(19) United States
(12) Patent Application Publication
(10) Pub. No.: US 2020/0347394 A1
(43) Pub. Date: Nov. 5, 2020

(54) GENES AND GENE COMBINATIONS FOR ENHANCED CROPS

(71) Applicant: YIELD10 BIOSCIENCE, INC., Woburn, MA (US)

(72) Inventors: Madana M.R. AMBAVARAM, Norwood, MA (US); Jihong TANG, West Roxbury, MA (US); Mariya SOMLEVA, Woburn, MA (US); Kieran RYAN, Sharon, MA (US); Oliver P. PEOPLES, Arlington, MA (US); Kristi D. SNELL, Belmont, MA (US)

(21) Appl. No.: 16/760,639

(22) PCT Filed: Nov. 2, 2018
(86) PCT No.: PCT/US2018/058840

§ 371 Date: Apr. 30, 2020

Related U.S. Application Data
(60) Provisional application No. 62/580,959, filed on Nov. 2, 2017.

(51) Int. Cl. C12N 15/82; C12N 15/113; C12N 9/22

(52) U.S. Cl. CPC C12N 15/8216; C12N 15/113; C12N 2800/80; C12N 15/8247; C12N 2310/20; C12N 9/22

(57) ABSTRACT

Plant transcription factors and genes encoding the transcription factors are disclosed. Methods to enhance characteristics in a plant by downregulating the genes encoding the transcription factors also are disclosed. The enhanced characteristics can include higher photosynthesis rates, reduced photorespiration rates, higher biomass yield or content, higher seed yield, improved harvest index, higher oil content, improved nutritional composition, improved nitrogen use efficiency, drought resistance, flood resistance, disease resistance, faster seed germination and plant emergence, improved seedling vigor, salt tolerance, higher CO₂ assimilation rate, and lower transpiration rate. Modified plants in which the genes encoding the transcription factors are downregulated also are disclosed. Compositions of the invention comprise polynucleotide sequences, polypeptide sequences, variants, orthologs, and fragments thereof. Methods comprise introducing into plants systems that reduce or eliminate the expression of transcription factors. Methods and compositions also provide plants with enhanced seed yield and/or seed oil content.

### FIELD OF THE INVENTION

[0001] The present invention relates generally to gene targets, genome editing materials and methods for controlling the expression of those gene targets alone or in combinations and more particularly, to plants having reduced expression of those gene targets such that they have improved performance in soil as compared to the same plant having normal expression of those genes.

### BACKGROUND OF THE INVENTION

[0002] The world faces a major challenge in the next 35 years to meet the increased demands for food production to feed a growing global population, which is expected to reach 9 billion by the year 2050. Food output will need to be increased by up to 60% in view of the growing population.

[0003] Major agricultural crops include food crops, such as maize, wheat, oats, barley, soybean, millet, sorghum, potato, pulse, bean, tomato, rice, cassava, sugar beets, and potatoes, among others, forage crop plants, such as hay, alfalfa, and silage corn, among others, and oilseed crops, such as camelina, Brassica species (e.g. B. napus (canola), B. rapa, B. juncea, and B. carinata), crambe, soybean, sunflower, safflower, oil palm, flax, and cotton, among others. Crop yield can also be reduced as a consequence of weather patterns, such as heat waves, freezing temperatures, drought or flooding conditions in a particular growing season. With intensive farming practices crop pests or diseases can also reduce yield.

[0004] During the late 1980's and early 1990's genetic engineering or transgenic plants were used for the first time to develop crops which are herbicide tolerant and/or pest or disease resistant by introducing genes from the most readily available source at the time, microorganisms, to impart these new functionalities. Unfortunately, “transgenic plants” or “GMO crops” or “biotech traits” are not widely accepted in a number of different jurisdictions and are subject to regulatory approval processes which are very time consuming and prohibitively expensive. The current regulatory framework for transgenic plants results in significant costs (˜$136 million per trait; McDougall, P. 2011, The cost and time involved in the discovery, development, and authorization of a new plant biotechnology derived trait. Crop Life International, https://croplife.org/wp-content/uploads/pdf_files/Getting-a-Biotech-Crop-to-Market-Phillips-McDougall-Study.pdf) and lengthy product development timelines that limit the number of technologies that are brought to market. These risks have severely impaired private investment and the adoption of innovation in this crucial sector. Recent advances in genome editing technologies provide an opportunity to precisely remove or inactivate specific plant genes or to alter their expression by modifying their promoter sequences to improve plant performance (Belhaj, K. 2013, Plant Methods, 9, 39; Khandagale & Nadal, 2016, Plant Biotechnol Rep, 10, 327). More importantly genome editing enables the ability to do this with combinations of gene targets either sequentially or simultaneously. The challenge then is to identify which genes to modify by genome editing to improve plant performance.

[0005] Plant scientists have been able to identify the ancient ancestors of modern major agricultural crops and have begun to map the key genetic changes that have taken place through the crop domestication process resulting in these crops. Many of these changes have resulted from the modification of the activity of key plant regulator genes or transcription factors. A classic example is the domestication of modern corn from the ancient plant Teosinte (Matsuoka, Y. et al., 2002, PNAS, 99, 6080-6084). Today we know that the modern corn genome contains around 39,000 genes and about 2,500 of these are transcription factors (Lin, et. al., 2014, BMC Genomics, 15, 818-820). Based on the teosinte-domestication-to-corn analogy it might seem reasonable to assume that by altering the activity of a relatively small number of transcription factors in plants used for food and feed production, significant improvements in crop performance could be achieved. For example it may be possible to improve the performance of corn substantially using genome editing tools to modify the expression of transcription factor genes. However, simple analysis explains why it is not feasible to consider testing these one by one and/or in all combinations. To test all two-transcription-factor-gene combinations would require over 3.3 million individual experiments.

[0006] Clearly there is a need to develop systems and approaches to identifying small number of transcription factors whose expression can be modified alone or in combinations to improve crop performance.

### BRIEF SUMMARY OF THE INVENTION

[0007] It is an object of the current invention to provide methods, materials and plants useful for identifying a number of transcription factor genes, and transcription factor gene combinations, as targets for modification to improve crop performance. It is a further objective of this invention to provide a set of specific transcription factor genes for each of corn, soybean and canola as well as their orthologs in other plant species, in particular alfalfa, sorghum, rice, sugar beets and wheat as well as the methods, DNA and RNA sequences for modifying or editing these transcription factor genes and transcription factor gene combinations to modulate their expression or activity and improve the performance of plants. It is a further objective of this invention to provide crops, including corn, soybean, canola, alfalfa, sorghum, rice, sugar beets and wheat, which have been modified according to this invention and which have improved performance characteristics in the field as compared to the same crops before they were modified as disclosed herein.

[0008] A method for modifying a plant is provided. The method comprises downregulating one or more of:

[0009] (a) at least one polynucleotide sequence comprising one or more of SEQ ID NOs: 1, 2, 3, 4, 5, 6, 7, 8, 9, 10, 11, 12, 13, 14, 15, 16, 17, 18, 19, 20, 21, 22, 23, 24, 35, 36, 37, 38, 39, 40, 41, 42, 43, 44, 45, 46, 47, 48, 49, 50, 51, 52, 53, 54, 55, 56, 57, 58, 59, 60, 61, 62, 63, 64, 65, 66, 67, 68, 69, 70, 71, 72, 73, 74, 75, 76, 77, 78, 79, 80, 81, 82, 83, 84, 85, 86, 87, 88, 89, 90, 91, 92, 93, 94, 95, 96, 97, 98, 99, 100, 101, 102, 103, 104, 105, 106, 107, 108, 109, 110, 111, 112, 113, 114, 115, 116, 117, 141, 142, 143, 144, 145, 146, 147, 148, 149, 150, 151, 152, 153, 154, 155, 156, 157, 158, 159, 160, 161, 162, 163, 164, 165, 166, 167, 168, 169, 170, 171, 172, 173, 174, 175, 176, 177, 178, 179, 180, 181, 182, 183, 184, 185, 186, 187, 188, 189, 190, 191, 192, 193, 194, 195, 196, 197, 198, 199, 200, 201, 202, 203, 204, 205, 206, 207, 208, 209, 210, 211, 212, 213, 214, 215, 216, 217, 218, 219, 220, 221, 222, 223, 224, 225, 226, 227, 228, 229, 230, 231, 232, 233, 234, 235, 236, 237, 238, 239, 240, 241, 242, 243, 244, 245, 246, 247, 248, 249, 250, 251, 252, 253, 254, 255, 256, 257, 258, 259, 260, 261, 262, 263, 264, 265, 266, 267, 268, 269, 270, 271, 272, 273, 274, 275, 276, 277, 278, 279, 280, 281, 282, 283, 284, 285, 287, 288, 544, 545, 722-741, or 762;

[0010] (b) at least one polynucleotide sequence comprising a sequence having at least 30%, 35%, 40%, 45%, 50%, 55%, 60%, 65%, 70%, 75%, 80%, 85%, 90%, 95% or higher sequence identity to at least one polynucleotide sequence set forth in (a);

[0011] (c) at least one polypeptide sequence encoded by at least one polynucleotide sequence set forth in (a) or (b);

[0012] (d) at least one polypeptide sequence comprising one or more of SEQ ID NOs: 289-542, 546, 547, 742-761, or 763; or

[0013] (e) at least one polypeptide sequence having at least 30%, 35%, 40%, 45%, 50%, 55%, 60%, 65%, 70%, 75%, 80%, 85%, 90%, 95% or higher sequence identity to at least one polypeptide sequence set forth in (d).

[0014] In some embodiments, the method further comprises growing the modified plant under conditions whereby the modified plant exhibits one or more enhanced characteristics as compared to a control plant grown under similar conditions.

[0015] In some embodiments, polynucleotide sequences comprising each of SEQ ID NOs: 22, 3, 9, 10, 14, 18, and 24 are downregulated. In some embodiments, polynucleotide sequences comprising each of SEQ ID NOs: 1, 3, 7, and 22 are downregulated. In some embodiments, polynucleotide sequences comprising each of SEQ ID NOs: 22, 28, 29, 30, 31, 32, 33, 34, 282, and 285 are downregulated. In some embodiments, a polynucleotide sequence comprising SEQ ID NO: 22 is downregulated in combination with downregulation of at least one polynucleotide sequence comprising one or more of SEQ ID NOs: 1, 2, 3, 4, 5, 6, 7, 8, 9, 10, 11, 12, 13, 14, 15, 16, 17, 18, 19, 20, 21, 23, or 24. In some embodiments, a polynucleotide sequence comprising SEQ ID NO: 22 is downregulated in combination with downregulation of at least one polynucleotide sequence comprising one or more of SEQ ID NOs: 2, 9, 10, or 18.

[0016] In some embodiments, the at least one polynucleotide sequence that is downregulated exhibits at least one of (i) a change in expression as compared to that of a control plant, or (ii) at least a two-fold change in expression as compared to that of a control plant. In some of these embodiments, the at least one polynucleotide sequence that is downregulated has been downregulated by overexpression of one or more global transcription factors selected from STR1, BMY, or STIF1.

[0017] In some embodiments, the at least one polynucleotide sequence that is downregulated has been downregulated by one or more of gene inactivation, deletion, insertion and/or substitution of one or more nucleotides, site-specific mutagenesis, chemical mutagenesis, targeting induced local lesions in genomes (TILLING), knock-out techniques, gene editing techniques using CRISPR nuclease selected from Cas nuclease, Cas9 nuclease, CasX nuclease, CasY nuclease, a Cpf1 nuclease, a C2c1 nuclease, a C2c2 nuclease (Cas13a nuclease), or a C2c3 nuclease, NgAgo nuclease, TALEN or ZFN techniques, or gene silencing induced by RNA interference. In some of these embodiments, the polynucleotide sequence that is downregulated has been downregulated by targeting at least one guide polynucleotide to one or more target sites selected from a promoter, a terminator or a coding sequence of the at least one polynucleotide sequence.

[0018] In some embodiments, the modified plant is one or more of a crop plant, a model plant, a monocotyledonous plant, a dicotyledonous plant, a plant with C3 photosynthesis, a plant with C4 photosynthesis, an annual plant, a perennial plant, a switchgrass plant, a maize plant, or a sugarcane plant. In some embodiments, the modified plant is soybean, canola, Medicago truncatula, alfalfa, sorghum, rice, wheat or Camelina.

[0019] In some embodiments, the modified plant exhibits one or more enhanced characteristics selected from higher photosynthesis rates, reduced photorespiration rates, higher biomass yield or content, higher seed yield, improved harvest index, higher seed oil content, improved nutritional composition, improved nitrogen use efficiency, drought resistance, flood resistance, disease resistance, faster seed germination and plant emergence, improved seedling vigor, salt tolerance, higher CO₂ assimilation rate, or lower transpiration rate. In some of these embodiments, the modified plant exhibits an increase in seed oil content or seed yield as compared to a control plant. In some of these embodiments, the seed oil content or seed yield of the modified plant is increased by 10%, 20%, 30%, 40%, 50%, 60%, 70%, 80%, 90%, 100% or higher relative to a control plant.

[0020] A modified plant also is disclosed. The modified plant comprises: (a) at least one polynucleotide sequence comprising one or more of SEQ ID NOs: 1, 2, 3, 4, 5, 6, 7, 8, 9, 10, 11, 12, 13, 14, 15, 16, 17, 18, 19, 20, 21, 22, 23, 24, 35, 36, 37, 38, 39, 40, 41, 42, 43, 44, 45, 46, 47, 48, 49, 50, 51, 52, 53, 54, 55, 56, 57, 58, 59, 60, 61, 62, 63, 64, 65, 66, 67, 68, 69, 70, 71, 72, 73, 74, 75, 76, 77, 78, 79, 80, 81, 82, 83, 84, 85, 86, 87, 88, 89, 90, 91, 92, 93, 94, 95, 96, 97, 98, 99, 100, 101, 102, 103, 104, 105, 106, 107, 108, 109, 110, 111, 112, 113, 114, 115, 116, 117, 141, 142, 143, 144, 145, 146, 147, 148, 149, 150, 151, 152, 153, 154, 155, 156, 157, 158, 159, 160, 161, 162, 163, 164, 165, 166, 167, 168, 169, 170, 171, 172, 173, 174, 175, 176, 177, 178, 179, 180, 181, 182, 183, 184, 185, 186, 187, 188, 189, 190, 191, 192, 193, 194, 195, 196, 197, 198, 199, 200, 201, 202, 203, 204, 205, 206, 207, 208, 209, 210, 211, 212, 213, 214, 215, 216, 217, 218, 219, 220, 221, 222, 223, 224, 225, 226, 227, 228, 229, 230, 231, 232, 233, 234, 235, 236, 237, 238, 239, 240, 241, 242, 243, 244, 245, 246, 247, 248, 249, 250, 251, 252, 253, 254, 255, 256, 257, 258, 259, 260, 261, 262, 263, 264, 265, 266, 267, 268, 269, 270, 271, 272, 273, 274, 275, 276, 277, 278, 279, 280, 281, 282, 283, 284, 285, 287, 288, 544, 545, 722-741, or 762;

[0021] (b) at least one polynucleotide sequence comprising a sequence having at least 30%, 35%, 40%, 45%, 50%, 55%, 60%, 65%, 70%, 75%, 80%, 85%, 90%, 95% or higher sequence identity to at least one polynucleotide sequence set forth in (a);

[0022] (c) at least one polypeptide sequence encoded by at least one polynucleotide sequence set forth in (a) or (b);

[0023] (d) at least one polypeptide sequence comprising one or more of SEQ ID NOs: 289-542, 546, 547, 742-761, or 763; or

[0024] (e) at least one polypeptide sequence having at least 30%, 35%, 40%, 45%, 50%, 55%, 60%, 65%, 70%, 75%, 80%, 85%, 90%, 95% or higher sequence identity to at least one polypeptide sequence set forth in (d),

[0025] wherein the least one polynucleotide sequence set forth in (a) or (b) or the at least one polypeptide sequence set forth in (c), (d), or (e) is downregulated, either alone or in combination with at least another polynucleotide sequence set forth in (a) or (b) or at least another polypeptide sequence set forth in (c), (d), or (e).

[0026] In some embodiments, at least two polynucleotide sequences set forth in (a) or (b) or at least two polypeptide sequences set forth in (c), (d), or (e) are downregulated.

[0027] In some embodiments, the at least one polynucleotide sequence that is downregulated exhibits at least one of (i) a change in expression as compared to that of a control plant, or (ii) at least a two-fold change in expression as compared to that of a control plant.

[0028] In some embodiments, the modified plant is one or more of a crop plant, a model plant, a monocotyledonous plant, a dicotyledonous plant, a plant with C3 photosynthesis, a plant with C4 photosynthesis, an annual plant, a perennial plant, a switchgrass plant, a maize plant, or a sugarcane plant. In some embodiments, the modified plant is soybean, canola, Medicago truncatula, alfalfa, sorghum, rice, wheat or Camelina.

[0029] In some embodiments, the modified plant exhibits one or more enhanced characteristics selected from higher photosynthesis rates, reduced photorespiration rates, higher biomass yield or content, higher seed yield, improved harvest index, higher seed oil content, improved nutritional composition, improved nitrogen use efficiency, drought resistance, flood resistance, disease resistance, faster seed germination and plant emergence, improved seedling vigor, salt tolerance, higher CO₂ assimilation rate, or lower transpiration rate. In some of these embodiments, the modified plant exhibits an increase in seed oil content or seed yield as compared to a control plant. Also in some of these embodiments, the seed oil content or seed yield of the modified plant is increased by 10%, 20%, 30%, 40%, 50%, 60%, 70%, 80%, 90%, 100% or higher relative to a control plant.

[0030] In some embodiments, the at least one polynucleotide sequence that is downregulated has been downregulated by one or more of gene inactivation, deletion, insertion and/or substitution of one or more nucleotides, site-specific mutagenesis, chemical mutagenesis, targeting induced local lesions in genomes (TILLING), knock-out techniques, gene editing techniques using CRISPR nuclease selected from Cas nuclease, Cas9 nuclease, CasX nuclease, CasY nuclease, a Cpf1 nuclease, a C2c1 nuclease, a C2c2 nuclease (Cas13a nuclease), or a C2c3 nuclease, NgAgo nuclease, TALEN or ZFN techniques, or gene silencing induced by RNA interference. In some of these embodiments, the polynucleotide sequence that is downregulated has been downregulated by targeting at least one guide polynucleotide to one or more target sites selected from a promoter, a terminator or a coding sequence of the at least one polynucleotide sequence.

[0031] A recombinant nucleic acid molecule also is disclosed. The recombinant nucleic acid molecule comprises:

[0032] (a) at least one polynucleotide sequence comprising one or more of SEQ ID NOs: 1-24, 35-117, 141-285, 287, 288, 544, 545, 722-741, or 762;

[0033] (b) at least one polynucleotide sequence comprising a sequence having at least 30%, 35%, 40%, 45%, 50%, 55%, 60%, 65%, 70%, 75%, 80%, 85%, 90%, 95% or higher sequence identity to at least one polynucleotide sequence set forth in (a); or

[0034] (c) a fragment of at least one polynucleotide sequence set forth in (a) or (b) that regulates gene expression.

[0035] A recombinant polypeptide molecule also is disclosed. The recombinant polypeptide molecule comprises:

[0036] (a) at least one polypeptide sequence comprising one or more of SEQ ID NOs: 289-542, 546, 547, 742-761, or 763;

[0037] (b) at least one polypeptide sequence comprising a sequence having at least 30% 35%, 40%, 45%, 50%, 55%, 60%, 65%, 70%, 75%, 80%, 85%, 90%, 95% or higher sequence identity to at least one polypeptide sequence set forth in (a); or

[0038] (c) a fragment of at least one polypeptide sequence of (a) or (b) that regulates gene expression.

[0039] A DNA construct also is disclosed. The DNA construct comprises:

[0040] (a) an expression cassette containing a polynucleotide sequence encoding a CRISPR nuclease;

[0041] (b) DNA encoding at least one guide RNA targeting the 5′ upstream region, promoter, terminator or coding sequence of one or more of SEQ ID NOs: 1-24, 35-117, 141-285, 287, 288, 544, 545, 722-741, or 762 or a polynucleotide sequence having at least 30% 35%, 40%, 45%, 50%, 55%, 60%, 65%, 70%, 75%, 80%, 85%, 90%, 95% or higher sequence identity to one or more of SEQ ID NOs: 1-24, 35-117, 141-285, 287, 288, 544, 545, 722-741, or 762; and

[0042] (c) an expression cassette for a selectable marker.

[0043] In some embodiments, the DNA encoding the at least one guide RNA is capable of downregulating a polynucleotide sequence comprising one or more of SEQ ID NOs: 1-24, 35-117, 141-285, 287, 288, 544, 545, 722-741, or 762, thereby producing enhanced characteristics in a plant selected from higher photosynthesis rates, reduced photorespiration rates, higher biomass yield or content, higher seed yield, improved harvest index, higher seed oil content, improved nutritional composition, improved nitrogen use efficiency, drought resistance, flood resistance, disease resistance, faster seed germination and plant emergence, improved seedling vigor, salt tolerance, higher CO₂ assimilation rate, or lower transpiration rate.

[0044] A modified plant transformed with the DNA construct also is provided. In some embodiments, at least one polynucleotide sequence comprising one or more of SEQ ID NOs: 1-24, 35-117, 141-285, 287, 288, 544, 545, 722-741, or 762 is downregulated. In some of these embodiments, the at least one polynucleotide sequence that is downregulated exhibits at least one of (i) a change in expression as compared to that of a control plant, or (ii) at least a two-fold change in expression as compared to that of a control plant. In some examples of these embodiments, the modified plant is one or more of a crop plant, a model plant, a monocotyledonous plant, a dicotyledonous plant, a plant with C3 photosynthesis, a plant with C4 photosynthesis, an annual plant, a perennial plant, a switchgrass plant, a maize plant, or a sugarcane plant. Also in some examples of these embodiments, the modified plant is soybean, canola, Medicago truncatula, alfalfa, sorghum, rice, wheat or Camelina. Also in some examples of these embodiments, the modified plant exhibits one or more enhanced characteristics selected from higher photosynthesis rates, reduced photorespiration rates, higher biomass yield or content, higher seed yield, improved harvest index, higher seed oil content, improved nutritional composition, improved nitrogen use efficiency, drought resistance, flood resistance, disease resistance, faster seed germination and plant emergence, improved seedling vigor, salt tolerance, higher CO₂ assimilation rate, or lower transpiration rate. In some of these examples, the modified plant exhibits an increase in seed oil content or seed yield as compared to a control plant. In some of these examples, the seed oil content or seed yield of the modified plant is increased by 10%, 20%, 30%, 40%, 50%, 60%, 70%, 80%, 90%, 100% or higher relative to a control plant.

[0045] A modified seed comprising the DNA construct also is provided.

[0046] A method of modifying a plant cell also is disclosed. The method comprises:

[0047] (a) expressing one or more site-specific nucleases in a plant cell, wherein the one or more nucleases target and cleave chromosomal DNA of one or more endogenous genes, their promoters, their 5′UTRs, and/or their polyadenylation sequences, and wherein the one or more endogenous genes comprise one or more of SEQ ID NOs: 1-24, 35-117, 141-285, 287, 288, 544, 545, 722-741, or 762;

[0048] (b) integrating one or more exogenous sequences into the one or more endogenous genes, their promoters, their 5′UTRs, and/or their polyadenylation sequences within the genome of the plant cell, wherein the one or more endogenous genes, their promoters, their 5′UTRs, and/or their polyadenylation sequences are modified such that the one or more endogenous genes do not express their corresponding endogenous gene product(s); and

[0049] (c) selecting plant cells that exhibit enhanced characteristics from among the plant cells in which the one or more exogenous sequences have been integrated.

[0050] In some embodiments, the one or more exogenous sequences are selected from a donor polynucleotide, a transgene, or a combination thereof. In some embodiments, the one or more exogenous sequences encode a transgene and/or are expressed to produce an RNA molecule. In some embodiments, the one or more exogenous sequences comprise a multiplex of gene edits made in the one or more endogenous genes, their promoters, their 5′UTRs, and/or their polyadenylation sequences.

[0051] In some embodiments, the integrating of the one or more exogenous sequences occurs by homologous recombination or non-homologous end joining.

[0052] In some embodiments, the one or more site-specific nucleases are selected from a zinc finger nuclease, a TAL effector domain nuclease, a homing endonuclease, or a CRISPR/Cas or a CRISPR/Cpf1 single guide RNA nuclease.

[0053] In some embodiments, the one or more endogenous genes comprising one or more of SEQ ID NOs: 1-24, 35-117, 141-285, 287, 288, 544, 545, 722-741, or 762 is downregulated. In some of these embodiments, the one or more endogenous genes that are downregulated exhibit at least one of (i) a change in expression as compared to that of a control plant, or (ii) at least a two-fold change in expression as compared to that of a control plant.

[0054] In some embodiments, the modified plant cell is a cell of one or more of a crop plant, a model plant, a monocotyledonous plant, a dicotyledonous plant, a plant with C3 photosynthesis, a plant with C4 photosynthesis, an annual plant, a perennial plant, a switchgrass plant, a maize plant, or a sugarcane plant. In some embodiments, the modified plant cell is a cell of soybean, canola, Medicago truncatula, alfalfa, sorghum, rice, wheat or Camelina.

[0055] In some embodiments, the method further comprises cultivating the modified plant cell to obtain a modified plant that exhibits one or more enhanced characteristics selected from higher photosynthesis rates, reduced photorespiration rates, higher biomass yield or content, higher seed yield, improved harvest index, higher seed oil content, improved nutritional composition, improved nitrogen use efficiency, drought resistance, flood resistance, disease resistance, faster seed germination and plant emergence, improved seedling vigor, salt tolerance, higher CO₂ assimilation rate, or lower transpiration rate. In some of these embodiments, the modified plant exhibits an increase in seed oil content or seed yield as compared to a control plant. In some examples of these embodiments, the seed oil content or seed yield of the modified plant is increased by 10%, 20%, 30%, 40%, 50%, 60%, 70%, 80%, 90%, 100% or higher relative to a control plant.

[0056] Accordingly, provided are modified plants transformed with the DNA construct, as well as modified seeds and progeny comprising the DNA construct. In some examples, the modified plants have at least one gene downregulated, which exhibits at least two-fold change in expression to that of a control plant.

[0057] Surprisingly, SEQ ID NO: 22 stands out as the sole downstream transcription factor that was downregulated by more than two-fold by all three global transcription factors STR1, STIF1 and BMY1, indicative of a good gene target as a negative regulator, as demonstrated in Example 2.

[0058] Plants of interest include a crop plant, a model plant, a monocotyledonous plant, a dicotyledonous plant, a plant with C3 photosynthesis, a plant with C4 photosynthesis, an annual plant, a perennial plant, a switchgrass plant, a maize plant, or a sugarcane plant. More preferably, the crop is selected from soybean, canola, alfalfa, sorghum, rice, wheat and Camelina.

[0059] The modified crop exhibits one or more enhanced characteristics selected from higher photosynthesis rates, reduced photorespiration rates, higher biomass yield or content, higher seed yield, improved harvest index, higher oil content, improved nutritional composition, drought resistance, flood resistance, disease resistance, faster seed germination and plant emergence, improved seedling vigor, higher CO₂ assimilation rate, and lower transpiration rate. In particular, the modified plant with the reduced expression of SEQ ID NO: 22 exhibits an increase in seed oil content or seed yield compared to that of a control plant. Preferably, the yield is increased by 10%, 20%, 30%, 40%, 50%, 60%, 70%, 80%, 90%, 100% or higher relative to a control plant.

### BRIEF DESCRIPTION OF THE DRAWINGS

[0060] FIG. 1 illustrates a Venn diagram that shows the number of downstream transcription factors (dTFs) that are down regulated by the global regulatory genes STR1, STF1, and BMY1 compared to wild-type controls. Only those dTFs where the log 2 fold change in expression is ≤−1 (downregulated by 2 fold or more) are shown. Intersecting circles show dTFs that are down regulated by two or more global regulatory genes. Only one dTF, dTF22, is down regulated by all three global regulatory genes by more than 2-fold.

[0061] FIG. 2 illustrates the plasmid map of binary vector pMBXS1032 for expression of dTF22 in monocots. The dTF22 gene is expressed from the maize cab-m5 light inducible promoter of the chlorophyll a/b/-binding protein fused to the intron from the maize heat shock protein 70 (hsp70).

[0062] FIG. 3 illustrates an amino acid alignment of the dTF22 sequence from switchgrass (Panicum virgatum) genotype YTEN(II56) and the dTF22 sequence as found in the sequenced switchgrass genotype AP13 (Phytozome). There are five amino acid differences in the amino acid sequences of the two proteins.

[0063] FIG. 4 illustrates biomass production in dTF22 overexpressing lines. The bars represent the average value of measurements of 3 plants per line as % to the wild type control. The control values (mean±SD, n=4) are as follows: 38.74±8.59 g dry weight (DW) total biomass, 13.72±1.32 g DW leaf biomass, 25.02±7.60 g DW stem biomass (leaf sheaths, nodes, internodes and panicles), and 28.00±3.74 total number of tillers.

[0064] FIG. 5 illustrates the phenotype of plants from the dTF22 overexpressing line 17, the smallest of the plants isolated. (A) Plants 1 month after transfer to soil. (B) Plants grown under greenhouse conditions for 3 months. Note the lack of normally developed stems. The plants did not form reproductive tillers by the end of the growth period of 4 months. WT, a wild type control plant; 1-3, transgenic plants of dTF22 line 17.

[0065] FIG. 6 illustrates genetic components at different stages of the Cas enzyme mediated genome editing process using the Cas9 enzyme as an example. Delivery of the genetic components can be achieved in multiple ways. Genetic transformation of the expression construct depicted in (A) into a plant cell will produce the single guide RNA (sgRNA) molecule in (B) that will complex with Cas9 (that is delivered separately through genetic transformation or other means) and achieve the structure depicted in (C) to promote cleavage of the target DNA. Alternatively, the sgRNA (B) can be synthesized in vitro and introduced into cells, often in the form of Ribonucleoprotein complexes (RNPs) that contain Cas9 protein to produce the structure depicted in (C) to promote cleavage of the target DNA. When using plant transformation techniques, an expression cassette (A) containing DNA encoding a sgRNA is used. This is composed of a promoter, often a plant RNA polymerase III promoter, DNA encoding a guide target sequence, DNA encoding a guide RNA scaffold (gRNA Sc), and a poly T-termination signal. The sequence of the guide target sequence is often identical to the target DNA to be cut, however several mismatches, depending on their position in the guide target sequence can be tolerated and still achieve double stranded DNA cleavage. Transcription of the expression cassette in (A) produces a sgRNA (B) which forms a complex with the Cas enzyme (C). The guide target sequence of the sgRNA pairs with the complementary DNA sequence to be mutated (C) that is adjacent to 3′ PAM sequence and double stranded DNA cleavage occurs. When using the Cas9 enzyme for cleavage, all guide target sequences are typically ˜20-nucleotides adjacent to a 3′ PAM sequence of (NGG) to initiate cleavage by the Cas9 enzyme. When using the CpfI enzyme for cleavage, guide target sequences are typically ˜23 nucleotides adjacent to a 5′ PAM sequence that varies with the specific enzyme. PAM sequences for select CpfI enzymes including engineered variants are shown in Table 17.

[0066] FIG. 7 illustrates the strategy for editing regions of a gene or its promoter using CRISPR. (A) At least five guide target sequences (FIG. 6, abbreviated Guide # x) are designed to target several regions spanning the promoter, 5′ untranslated regions (5′ UTR), and coding sequence of the gene. The general numbering strategy used for guide target sequences is as follows. The sequence of the 5′UTR of the gene of interest plus an additional 1000 bp was analyzed for guide target sequences to target portions of the promoter region for mutation or excision. Since the length of the 5′ UTR varies for each gene, x denotes the size of the known or predicted UTR. Position #(1000+x) is the base directly in front of the ATG at the start of the coding sequence. In most examples, three guide target sequences were designed in the promoter region and at least two within the coding sequence of the gene. (B) All guide target sequences can be used to form sgRNAs, as described in FIG. 6, that can be used individually to create simple INDELS (insertion or deletion of a small number of bases). In the coding region, this may create a frameshift which will truncate the protein. In the promoter region, this may modify the strength of the promoter or, in some regions, inactivate the promoter. Pairs of guide target sequences can be used to form sgRNAs that can be used to excise regions of DNA. Guide target sequences 1 and 2 or 1 and 3 can be selected to excise the indicated regions of the promoter. Guide target sequences #4 and #5 are designed to excise a substantial portion of the gene to inactivate the gene, including introns where present. n designates the number of intron/exon regions between guide target sequences #4 and #5 which varies with each gene. To excise both regions of the promoter and the coding sequence, guide target sequences 3 and 5 can be used. (C) Example deletion strategy using rice dTF22 gene (Gene ID LOC_Os03g41330, SEQ ID NO: 27) with a 160 bp 5′ UTR (x=160) and another 1000 bp of sequence upstream of the 5′UTR. The dTF22 gene contains 2 exons (n=1).

[0067] FIG. 8 illustrates the plasmid map of binary construct pYTEN-24 for Cas9 mediated genome editing of the coding sequence of the rice dTF22 gene using guide target sequence #4 (Table 2). The construct contains the 2×35S promoter driving the expression of the Cas9 gene which has been codon optimized for rice. The gene encoding Cas9 is flanked by nuclear localization sequences (NLS) to ensure delivery into nuclei. The rice codon-optimized Streptococcus pyrogenes Cas9 and NLS sequence were synthesized using sequences described by Shan et al., 2013, Nat Biotechnol, 3, 686-688. The CaMV terminator sequence is downstream of the gene encoding Cas9. The rice U6 promoter drives the expression of DNA guide target sequence #4, targeted to the rice dTF22 coding sequence (FIG. 7C, Table 2) in the rice genome, and DNA encoding the guide RNA scaffold producing a functional single guide RNA (sgRNA). A poly T-termination signal is located downstream of the guide target sequence and the DNA fragment encoding the guide RNA scaffold. An expression cassette for selection of transgenic plants for hygromycin resistance contains the CaMV35S promoter, an hsp70 intron, a hpt1 gene encoding hygromycin phosphotransferase containing an intron from the bean catalase-1 gene (CAT-1 intron), and a CaMV35S polyA termination sequence.

[0068] FIG. 9 illustrates the plasmid map of binary construct pMBXS1223 for Cas9 mediated genome editing of the coding sequence of the rice dTF22 gene using DNA guide target sequences #6 and 7 (Table 3). The construct contains the 2×35S promoter driving the expression of the Cas9 gene which has been codon optimized for rice. The gene encoding Cas9 is flanked by nuclear localization sequences (NLS) to ensure delivery into nuclei. The rice codon-optimized Streptococcus pyrogenes Cas9 and NLS sequence were synthesized using sequences described by Shan et al., 2013, Nat Biotechnol, 3, 686-688. The CaMV terminator sequence is downstream of the gene encoding Cas9. An expression cassette for guide target sequence #6 (FIG. 7C, Table 3) contains the rice U6 promoter, guide target sequence #6 targeted to the rice dTF22 coding sequence in the rice genome, DNA encoding the guide RNA scaffold, and a poly T-termination sequence. A second expression cassette contains the rice U6 promoter, guide target sequence #7 (FIG. 7C, Table 3) targeted to the rice dTF22 coding sequence in the rice genome, a DNA fragment encoding the guide RNA scaffold, and a poly T-termination sequence. An expression cassette for selection of transgenic plants for hygromycin resistance contains the CaMV35S promoter, an hsp70 intron, a hpt1 gene encoding hygromycin phosphotransferase containing an intron from the bean catalase-1 gene (CAT-1 intron), and a CaMV35S polyA termination sequence.

[0069] FIG. 10 illustrates the types of mutations observed in rice plants transformed with the editing vector pMBXS1223. (A) Mutations observed with guide target sequence #7 (FIG. 7C, Table 3). (B) Mutations observed with guide target sequence #6 (FIG. 7C, Table 3). The boxed regions highlight the observed mutations. The underlined TGG sequence is the PAM site.

[0070] FIG. 11 illustrates the plasmid map of binary construct pYTEN-25 for Cas9 mediated multiplex genome editing of the coding sequences of the maize dTF10, dTF18, dTF22, and dTF60 genes using guide target sequence #4 (Table 9) for dTF10, dTF18, and dTF22 and a guide target sequence with the sequence 5′-CTGAAGCCGAACCAGCCTGG-3′ (SEQ ID NO: 697) for dTF60. The construct contains the 2×35S promoter driving the expression of a gene expressing Cas9 which has been codon optimized for rice. The gene encoding Cas9 is flanked by nuclear localization sequences (NLS) to ensure delivery into nuclei. The rice codon-optimized Streptococcus pyrogens Cas9 and NLS sequence were synthesized using sequences described by Shan et al., 2013, Nat Biotechnol, 3, 686-688. A poly T-termination sequence is downstream of the gene encoding Cas9. An expression cassette for each guide target sequence contains: the rice U6 promoter driving the expression of both the guide target sequence as well as DNA encoding its associated guide RNA scaffold, and a poly T-termination sequence. An expression cassette for selection of transgenic plants contains the CaMV35S promoter, an hsp70 intron, a hpt1 gene encoding hygromycin phosphotransferase containing an intron from the bean catalase-1 gene (CAT-1 intron), and a CaMV35S polyA sequence to provide hygromycin resistance to transgenic plants.

### DETAILED DESCRIPTION OF THE INVENTION

[0071] The following terms, unless otherwise indicated, shall be understood to have the following meanings:

[0072] As used herein we use the terms “crops” and “plants” interchangeably. “Gene” refers to a nucleic acid fragment that expresses a specific protein, including regulatory sequences preceding (5′ non-coding sequences) and following (3′ non-coding sequences) the coding sequence. “Native gene” refers to a gene as found in nature with its own regulatory sequences. “Chimeric gene” or “recombinant expression construct”, which are used interchangeably, refers to any gene that is not a native gene, comprising regulatory and coding sequences that are not found together in nature. Accordingly, a chimeric gene may comprise regulatory sequences and coding sequences that are derived from different sources, or regulatory sequences and coding sequences derived from the same source, but arranged in a manner different than that found in nature. “Endogenous gene” refers to a native gene in its natural location in the genome of an organism. A “foreign” gene refers to a gene not normally found in the host organism, but that is introduced into the host organism by gene transfer. Foreign genes can comprise native genes inserted into a non-native organism, or chimeric genes. A “transgene” is a gene that has been introduced into the genome by a transformation procedure. As used herein the term “coding sequence” refers to a DNA sequence which codes for a specific amino acid sequence. “Regulatory sequences” refer to nucleotide sequences located upstream (5′ non-coding sequences), within, or downstream (3′ non-coding sequences) of a coding sequence, and which influence the transcription, RNA processing or stability, or translation of the associated coding sequence. Regulatory sequences may include, but are not limited to, promoters, translation leader sequences, introns, and polyadenylation recognition sequences. As used herein “gene” includes protein coding regions of the specific genes and the regulatory sequences both 5′ and 3′ which control the expression of the gene.

[0073] As used herein a “modified plant” refers to non-naturally occurring plants or crops engineered as described throughout herein.

[0074] As used herein a “control plant” means a plant that does not contain the recombinant DNA of the present disclosure that imparts an enhanced trait or altered phenotype. A control plant is used to identify and select a modified plant that has an enhanced trait or altered phenotype. For instance, a control plant can be a plant that has not been modified or has not been genome edited to express or to inhibit its endogenous gene product. A suitable control plant can be a non-transgenic plant of the parental line used to generate a transgenic plant, for example, a wild type plant devoid of a recombinant DNA. A suitable control plant can also be a transgenic plant that contains recombinant DNA that imparts other traits, for example, a transgenic plant having enhanced herbicide tolerance. A suitable control plant can in some cases be a progeny of a hemizygous transgenic plant line that does not contain the recombinant DNA, known as a negative segregant, or a negative isogenic line.

[0075] As used herein the terms “biomass yield” or “biomass content” refer to increase or decrease in the % dry weight in an amount greater than an otherwise identical plant, cultured under identical conditions, but lacking any corresponding modification, e.g., gene editing or the transgene in a control plant.

[0076] As used herein the terms “oil seed yield” or “seed oil content” refer to oil content of a seed as measured, e.g., expressed on the basis of seed dry weight.

[0077] As used herein, the terms “reduce activity,” “reduce expression,” “down-regulating,” or “downregulated” are used interchangeably and mean the activity of the transcription factor is reduced or lower than the expression of the same gene in the same plant species before the gene was modified as described herein. Downregulation should be understood to include a decrease in the level or activity of a target gene in a cell and/or substantially complete inhibition of a particular target polypeptide in a cell which normally expresses the target polypeptide. For instance, a 1%, 5%, 10%, 20%, 30%, 40%, 50%, 60%, 70%, 80%, 90%, 100%, 2-fold, 5-fold, 10-fold, 20-fold, 50-fold, 100-fold decrease in the level of activity of a target polypeptide in the cell. With respect to term “2-fold reduction”, “downregulated 2-fold” and 100% decrease is used interchangeably.

[0078] “Codon degeneracy” refers to divergence in the genetic code permitting variation of the nucleotide sequence without affecting the amino acid sequence of an encoded polypeptide. Accordingly, the instant invention relates to any nucleic acid fragment comprising a nucleotide sequence that encodes all or a substantial portion of the amino acid sequences set forth herein. The skilled artisan is well aware of the “codon-bias” exhibited by a specific host cell in usage of nucleotide codons to specify a given amino acid. Therefore, when synthesizing a nucleic acid fragment for increased expression in a host cell, it is desirable to design the nucleic acid fragment such that its frequency of codon usage approaches the frequency of preferred codon usage of the host cell.

[0079] As used herein, “sequence identity” or “identity” in the context of two polynucleotides or polypeptide sequences makes reference to the residues in the two sequences that are the same when aligned for maximum correspondence over a specified comparison window. When percentage of sequence identity is used in reference to proteins it is recognized that residue positions which are not identical often differ by conservative amino acid substitutions, where amino acid residues are substituted for other amino acid residues with similar chemical properties (e.g., charge or hydrophobicity). When sequences differ in conservative substitutions, the percent sequence identity may be adjusted upwards to correct for the conservative nature of the substitution. Sequences that differ by such conservative substitutions are said to have “sequence similarity” or “similarity”. Means for making this adjustment are well known to those of skill in the art. Typically this involves scoring a conservative substitution as a partial rather than a full mismatch, thereby increasing the percent sequence identity. Thus, for example, where an identical amino acid is given a score of 1 and a non-conservative substitution is given a score of zero, a conservative substitution is given a score between zero and 1. The scoring of conservative substitutions is calculated, e.g., as implemented in the program PC/GENE (Intelligenetics, Mountain View, Calif.).

[0080] As used herein, “percent sequence identity” means the value determined by comparing two aligned sequences over a comparison window, wherein the portion of the polynucleotide sequence in the comparison window may comprise additions or deletions (i.e., gaps) as compared to the reference sequence (which does not comprise additions or deletions) for optimal alignment of the two sequences. The percentage is calculated by determining the number of positions at which the identical nucleic acid base or amino acid residue occurs in both sequences to yield the number of matched positions, dividing the number of matched positions by the total number of positions in the window of comparison, and multiplying the result by 100 to yield the percent sequence identity.

[0081] The term “plant” includes whole plant, mature plants, seeds, shoots and seedlings, and parts, propagation material, plant organ tissue, protoplasts, callus and other cultures, for example cell cultures, derived from plants belonging to the plant subkingdom Embryophyta, and all other species of groups of plant cells giving functional or structural units, also belonging to the plant subkingdom Embryophyta. The term “mature plants” refers to plants at any developmental stage beyond the seedling. The term “seedlings” refers to young, immature plants at an early developmental stage.

[0082] The modern corn genome contains around 39,000 thousand genes and about 2,500 of these are transcription factors (Lin, et. al., 2014, BMC Genomics, 15, 818-820). Herein we have focused on identifying a number of transcription factor genes which we have shown to function as negative regulators of plant growth and performance based on their expression being significantly reduced in engineered plants with higher photosynthesis, higher carbon flux through central metabolism and increased biomass production (WO2014100289 to Yield10 Bioscience) as described in detail in Example 1. The reduced expression of these specific genes in genetically engineered plants with higher photosynthesis, carbon flux through central metabolism and yield of fixed carbon in the form of biomass indicates that they function as negative controllers of plant growth and performance and hence are good targets for reducing their expression to improve crop performance.

[0083] Although the genes are identified in each crop by the sequence ID numbers for the structural gene in the Examples and Tables herein, it is well understood by those skilled in the art to identify the DNA sequences 5′ and 3′ to the structural gene to identify sequences controlling the expression of the transcription factor genes of interest in the specific crops of interest. It is also well known in the art that different crops may have different numbers of copies of each chromosome and hence may have more than one copy of each of the 24 transcription factor genes and there may be sequence differences in each copy of the gene in a particular crop species.

### PREFERRED EMBODIMENTS

[0084] The present disclosure relates to transcription factor genes in specific crop species whose expression or activity can be modulated to increase crop performance and crops having reduced expression of these transcription factor genes alone and in combinations which have improved performance compared to the same plants with normal expression levels of these genes. Also disclosed are specific transcription factor gene sequences, DNA sequences, RNA sequences and materials and methods for modifying plant cells and plants such that they have reduced expression of the transcription factor genes, methods for identifying plant cells and plants with reduced expression of the transcription factor genes and methods for producing fertile plants with reduced expression of the transcription factor genes wherein the modified plants have improved performance as compared to the same plants before they were modified to reduce the expression of these genes.

[0085] In various aspects, the present invention provides transcription factor genes useful for practicing the disclosed invention and include those that can function as negative controllers or feedback controllers in plants. Plants evolved over millennia simply to survive and reproduce before the involvement of humans to domesticate specific plants which we recognize today as the major food and feed crops. During the domestication process the intervention of humans either through agronomic practices or through crop breeding led to the “unnatural” selection of crops for specific purposes, for example corn for grain yield, and sorghum and alfalfa for forage applications. There is genetic evidence from the domestication of teosinte to corn (maize) that the downregulation or reduced expression of transcription factors was important in achieving the performance and grain yield of the modern crop. Transcription factors function to either increase the activity of specific metabolic pathways or gene regulatory networks in plants or to decrease them. Herein we have identified 24 transcription factors in crops which may act as negative controllers of key plant systems related to crop performance. It is well known in the field of metabolic engineering (synthetic biology) that a key to increasing the yield of a particular target product is to remove the negative control steps in the metabolic systems or pathways related to the target of interest. Without wishing to be bound by the theory, we believe one way to significantly improve the performance of crops is to identify and remove or down regulate key negative control points alone and in combinations in plant genes involved in gene regulation and metabolism. Herein we disclose 24 transcription factor genes which function as negative controllers in switchgrass and their equivalents or orthologs in major crop species whose reduced expression is important for improved performance as described in Example 1, Table 1. Also disclosed in Table 1 are combinations of these 24 transcription factor genes which function as negative controllers in switchgrass and their equivalents or orthologs in major crop species whose reduced expression is important for improved performance.

[0086] In one embodiment, 24 switchgrass transcription factors have been identified as functioning as negative controllers of plant production in transgenic switchgrass lines. These transcription factor genes and their orthologs and homologs in other crops are useful targets for modification to reduce their expression and improve plant performance. Other crops of interest for the disclosed invention include corn, soybean, canola, sorghum, rice, wheat and alfalfa and many other crops. The 24 switchgrass transcription factors include SEQ ID NO: 1 (Pavirv00029177m), SEQ ID NO: 2 (Pavirv00003507m), SEQ ID NO: 3 (AP13CTG12699_at), SEQ ID NO: 4 (Pavirv00024770m), SEQ ID NO: 5 (Pavirv00012672m), SEQ ID NO: 6 (Pavirv00006905m), SEQ ID NO: 7 (Pavirv00011545m), SEQ ID NO: 8 (Pavirv00039321m), SEQ ID NO: 9 (Pavirv00007251m), SEQ ID NO: 10 (AP13ITG41879_s_at), SEQ ID NO: 11 (Pavirv00007239m), SEQ ID NO: 12 (Pavirv00003464), SEQ ID NO: 13 (Pavirv00006072m), SEQ ID NO: 14 (Pavirv00000078m), SEQ ID NO: 15 (Pavirv00012008m), SEQ ID NO: 16 (AP13CTG14279ST_s_at), SEQ ID NO: 17 (Pavirv00053825m), SEQ ID NO: 18 (Pavirv00008285m), SEQ ID NO: 19 (Pavirv00010659m), SEQ ID NO: 20 (Pavirv00067953m), SEQ ID NO: 21 (Pavirv00005696m), SEQ ID NO: 22 (Pavirv00012971m), SEQ ID NO: 23 (Pavirv00056268m) and SEQ ID NO: 24 (Pavirv00036358m).

[0087] Isolated nucleic acid molecules for genes encoding enzymes, and variants thereof, are provided. Exemplary full-length nucleic acid sequences for genes encoding enzymes and the corresponding amino acid sequences are presented in Tables 1, 5, 6, 8, and 10-15. The nucleic acid sequence can be preferably greater than 80%, 85%, 90%, 95%, 98%, 99%, 99.9% or even higher identity to the wild-type gene.

[0088] In another embodiment, the nucleic acid molecule encodes a polypeptide having an amino acid sequence disclosed in the Table(s). Preferably, the nucleic acid molecule encodes a polypeptide sequence of at least 50%, 60, 70%, 80%, 85%, 90% or 95% identity to the amino acid sequences shown in the Table(s) and the identity can even more preferably be 96%, 97%, 98%, 99%, 99.9% or even higher.

[0089] According to another aspect, isolated polypeptides (including muteins, allelic variants, fragments, derivatives, and analogs) encoded by the nucleic acid molecules are provided. In one embodiment, the isolated polypeptide comprises the polypeptide sequence corresponding to a polypeptide sequence shown in the Table(s).

[0090] In an alternative embodiment, the isolated polypeptide comprises a polypeptide sequence at least 30%, 35%, 40%, 45%, 50%, 55%, 60%, 65%, 70%, 75%, 80%, 85%, 90%, 95% or higher sequence identity to the polypeptide sequences shown in the Table(s). Preferably the isolated polypeptide has at least 50%, 60, 70%, 80%, 85%, 90%, 95%, 98%, 98.1%, 98.2%, 98.3%, 98.4%, 98.5%, 98.6%, 98.7%, 98.8%, 98.9%, 99%, 99.1%, 99.2%, 99.3%, 99.4%, 99.5%, 99.6%, 99.7%, 99.8%, 99.9% or even higher identity to a polypeptide SEQ ID NOs: 289-542, 546, 547, 742-761, or 763.

[0091] According to other embodiments, isolated polypeptides comprising a fragment of the above-described polypeptide sequences are provided. These fragments preferably include at least 20 contiguous amino acids, more preferably at least 25, 30, 35, 40, 45, 50, 60, 70, 80, 90, 100 or even more contiguous amino acids.

[0092] Nucleic acid molecules that hybridize under stringent conditions to the above-described nucleic acid molecules also are provided. As defined above, and as is well known in the art, stringent hybridizations are performed at about 25° C. below the thermal melting point (Tₘ) for the specific DNA hybrid under a particular set of conditions, where the Tₘ is the temperature at which 50% of the target sequence hybridizes to a perfectly matched probe. Stringent washing is performed at temperatures about 5° C. lower than the Tₘ for the specific DNA hybrid under a particular set of conditions.

[0093] Nucleic acid molecules comprising a fragment of any one of the above-described nucleic acid sequences are also provided. These fragments preferably contain at least 20 contiguous nucleotides. More preferably the fragments of the nucleic acid sequences contain at least 25, 30, 35, 40, 45, 50, 60, 70, 80, 90, 100 or even more contiguous nucleotides.

[0094] The different families of transcription factors found in crops are described for example by Lin, et. al., (2014, BMC Genomics, 15, 818-820).

[0095] SEQ ID NO: 1 encodes a transcription factor gene which contains a sequence-specific DNA binding domain with homology to proteins in the MYB family. This gene is predicted to be involved in the abscisic acid (ABA)-response and also interact with other downstream transcription factors for improvement of grain yield and stress tolerance by modification of cell cycle and/or photosynthesis pathways.

[0096] SEQ ID NO: 2 encodes a transcription factor gene which contains a sequence-specific DNA binding domain with homology to proteins in the MYB family. This gene is predicted to be involved in abscisic acid (ABA) signaling cascade to regulate stomatal movement and drought stress and disease resistance.

[0097] SEQ ID NO: 3 encodes a transcription factor gene which contains a sequence-specific DNA binding domain with homology to proteins in the MYB family. This gene is predicted to play a crucial role in the control of the cell cycle.

[0098] SEQ ID NO: 4 encodes a transcription factor gene which contains a sequence-specific DNA binding domain with homology to proteins in the bZIP family and is predicted to regulate processes including pathogen defense, light and stress signaling, seed maturation and flower development.

[0099] SEQ ID NO: 5 encodes a transcription factor gene which contains a sequence-specific DNA binding domain with homology to proteins in the G2-like family of transcription factors, which are members of the GARP superfamily of transcription factors. This gene is predicted to be involved in chloroplast development in both green and non-green tissues.

[0100] SEQ ID NO: 6 encodes a transcription factor gene which contains a sequence-specific DNA binding domain with homology to proteins in the CO-like family. CO (CONSTANS) genes act between the circadian clock and genes controlling meristem identity which also suggests a possible role in late or delayed flowering.

[0101] SEQ ID NO: 7 encodes a transcription factor gene which contains a sequence-specific DNA binding domain with homology to proteins in the bZIP family with a predicted role in regulating a number of processes including pathogen defense, light and stress signaling, seed maturation and flower development.

[0102] SEQ ID NO: 8 encodes a transcription factor gene which contains a sequence-specific DNA binding domain with homology to proteins in the ERF family. This transcription factor family includes dehydration-responsive element-binding proteins (DREBs), which activate the expression of abiotic stress-responsive genes and the transcriptional regulation of a variety of biological processes related to growth and development.

[0103] SEQ ID NO: 9 encodes a transcription factor gene which contains a sequence-specific DNA binding domain with homology to proteins in the HD-ZIP family. The homeodomain-leucine zipper (HD-Zip) proteins are transcription factors unique to plants and this protein is predicted to be involved in light response, shade avoidance and auxin signaling.

[0104] SEQ ID NO: 10 encodes a transcription factor gene which contains a sequence-specific DNA binding domain with homology to proteins in the HSF family. The Heat stress transcription factor (HSF) gene is predicted to be involved in abiotic stresses such as high temperature, salinity, and drought which adversely affect the survival, growth, and reproduction of plants.

[0105] SEQ ID NO: 11 encodes a transcription factor gene which contains a sequence-specific DNA binding domain with homology to proteins in the bZIP family. This gene is predicted to be involved in many central developmental and physiological processes including photomorphogenesis, leaf and seed formation, energy homeostasis, and abiotic and biotic stress responses.

[0106] SEQ ID NO: 12 encodes a transcription factor gene which contains a sequence-specific DNA binding domain with homology to proteins in the family G2-like family and has a predicted role as a transcriptional regulator of chloroplast development.

[0107] SEQ ID NO: 13 encodes a transcription factor gene which contains a sequence-specific DNA binding domain with homology to proteins in the ERF family. This gene is predicted to be involved in transcriptional regulation of a variety of biological processes related to growth and development, as well as cold and freezing stress tolerance.

[0108] SEQ ID NO: 14 encodes a transcription factor gene which contains a sequence-specific DNA binding domain with homology to proteins in the MYB family and its expression correlates with abiotic (drought, cold and salinity) stress responsive genes.

[0109] SEQ ID NO: 15 encodes a transcription factor gene which contains a sequence-specific DNA binding domain with homology to proteins in the C2H2 family. The protein encoded by this gene belongs to the family of C2H2-type zinc-finger proteins. It functions as a transcriptional regulator that activates genes involved in primary metabolic processes.

[0110] SEQ ID NO: 16 encodes a transcription factor gene which contains a sequence-specific DNA binding domain with homology to proteins in the NIN-like family. This protein is predicted to act as a master regulator of nitrate-promoted seed germination.

[0111] SEQ ID NO: 17 encodes a transcription factor gene which contains a sequence-specific DNA binding domain with homology to proteins in the HSF family and is predicted to be involved in the plants response to abiotic stresses such as high temperature, salinity, and drought which adversely affect the survival, growth, and reproduction of plants.

[0112] SEQ ID NO: 18 encodes a transcription factor gene which contains a sequence-specific DNA binding domain with homology to proteins in the CO-like family. This CO-like gene is predicted to be involved in the circadian clock and genes controlling meristem identity.

[0113] SEQ ID NO: 19 encodes a transcription factor gene which contains a sequence-specific DNA binding domain with homology to proteins in the MIKC family and is predicted to be involved in flower and seed development and may also play a role in the regulation of downstream genes and pathways.

[0114] SEQ ID NO: 20 encodes a transcription factor gene which contains a sequence-specific DNA binding domain with homology to proteins in the ARF family. This gene is considered to play a key role in auxin signaling and the molecular mechanisms that control the embryogenic transition of plant somatic cells.

[0115] SEQ ID NO: 21 encodes a transcription factor gene which contains a sequence-specific DNA binding domain with homology to proteins in the bHLH family and is predicted to be involved in the regulation of genes involved in biotic and abiotic stress responses.

[0116] SEQ ID NO: 22 encodes a transcription factor gene which contains a sequence-specific DNA binding domain with homology to proteins in the LBD family. This gene is strongly associated with abscisic acid (ABA) biosynthesis and may act as a ‘negative regulator’ for growth and developmental processes.

[0117] SEQ ID NO: 23 encodes a transcription factor gene which contains a sequence-specific DNA binding domain with homology to proteins in the bHLH family and is predicted to be involved in the regulation of genes involved in biotic and abiotic stress responses.

[0118] SEQ ID NO: 24 encodes a transcription factor gene which contains a sequence-specific DNA binding domain belongs to the ERF family and is predicted to be involved in transcriptional regulation of a variety of biological processes related to growth and development, as well as cold and freezing stress tolerance.

[0119] It is well known in the art that many plant species, especially polyploid plant species, contain more than one copy of a specific gene and this invention encompasses all copies or homologs of the specific genes identified. It is also routine in the art to use the DNA sequence and protein sequence of the encoded polypeptide of a gene of interest from one crop to carry out homology searches using methods of sequence alignment which are well known in the art to identify the equivalent genes in other crop species.

[0120] Methods of alignment of sequences for comparison are well known in the art. Thus, the determination of percent sequence identity between any two sequences can be accomplished using a mathematical algorithm. Non-limiting examples of such mathematical algorithms are the algorithm of Myers and Miller (1988) CABIOS 4:11-17; the local alignment algorithm of Smith et al. (1981) Adv. Appl. Math. 2:482; the global alignment algorithm of Needleman and Wunsch (1970) J. Mol. Biol. 48:443-453; the search-for-local alignment method of Pearson and Lipman (1988) Proc. Natl. Acad. Sci. 85:2444-2448; the algorithm of Karlin and Altschul (1990) Proc. Natl. Acad. Sci. USA 872264, modified as in Karlin and Altschul (1993) Proc. Natl. Acad. Sci. USA 90:5873-5877. Computer implementations of these mathematical algorithms can be utilized for comparison of sequences to determine sequence identity. Such implementations include, but are not limited to: CLUSTAL in the PC/Gene program (available from Intelligenetics, Mountain View, Calif.); the ALIGN program (Version 2.0) and GAP, BESTFIT, BLAST, FASTA, and TFASTA in the GCG Wisconsin Genetics Software Package, Version 10 (available from Accelrys Inc., 9685 Scranton Road, San Diego, Calif., USA). Alignments using these programs can be performed using the default parameters. The CLUSTAL program is well described by Higgins et al. (1988) Gene 73:237-244 (1988); Higgins et al. (1989) CABIOS 5:151-153; Corpet et al. (1988) Nucleic Acids Res. 16:10881-90; Huang et al. (1992) CABIOS 8:155-65; and Pearson et al. (1994) Meth. Mol. Biol. 24:307-331. The ALIGN program is based on the algorithm of Myers and Miller (1988) supra. A PAM120 weight residue table, a gap length penalty of 12, and a gap penalty of 4 can be used with the ALIGN program when comparing amino acid sequences. The BLAST programs of Altschul et al (1990) J. Mol. Biol. 215:403 are based on the algorithm of Karlin and Altschul (1990) supra. BLAST nucleotide searches can be performed with the BLASTN program, score=100, wordlength=12, to obtain nucleotide sequences homologous to a nucleotide sequence encoding a protein of the invention. BLAST protein searches can be performed with the BLASTX program, score=50, wordlength=3, to obtain amino acid sequences homologous to a protein or polypeptide of the invention. BLASTP protein searches can be performed using default parameters. See, blast.ncbi.nlm.nih.gov/Blast.cgi.

[0121] Sequence alignments and percent similarity calculations may be determined using the Megalign program of the LASARGENE bioinformatics computing suite (DNASTAR Inc., Madison, Wis.) or using the AlignX program of the Vector NTI bioinformatics computing suite (Invitrogen, Carlsbad, Calif.). Multiple alignment of the sequences are performed using the Clustal method of alignment (Higgins and Sharp, CABIOS 5:151-153 (1989)) with the default parameters (GAP PENALTY=10, GAP LENGTH PENALTY=10). Default parameters for pairwise alignments and calculation of percent identity of protein sequences using the Clustal method are KTUPLE=1, GAP PENALTY=3, WINDOW=5 and DIAGONALS SAVED=5. For nucleic acids these parameters are GAP PENALTY=10, GAP LENGTH PENALTY=10, KTUPLE=2, GAP PENALTY=5, WINDOW=4 and DIAGONALS SAVED=4. A “substantial portion” of an amino acid or nucleotide sequence comprises enough of the amino acid sequence of a polypeptide or the nucleotide sequence of a gene to afford putative identification of that polypeptide or gene, either by manual evaluation of the sequence by one skilled in the art, or by computer-automated sequence comparison and identification using algorithms such as BLAST (Altschul, S. F. et al., J. Mol. Biol. 215:403-410 (1993)) and Gapped Blast (Altschul, S. F. et al., Nucleic Acids Res. 25:3389-3402 (1997)). BLASTN refers to a BLAST program that compares a nucleotide query sequence against a nucleotide sequence database.

[0122] Disclosed herein are corn (maize) orthologs of the 24 switchgrass transcription factor genes listed in Table 1 which are useful for practicing this invention. The maize orthologs of the 24 switchgrass transcription factor genes are specified by SEQ ID NOs: 35-56, 110, and 111 (Tables 8 and 10) and reducing their expression alone or in combinations in corn to improve corn performance is included in the scope of this invention. Additional homologs to the maize genes SEQ ID NOs: 35-56, 110, and 111 are provided as SEQ ID NOs: 57-109 and 112-117 (Table 8), and reducing their expression alone or in combination with the 24 maize orthologs of the switchgrass dTFs to improve maize performance is included in the scope of this invention.

[0123] Disclosed herein are soybean orthologs of the 24 switchgrass transcription factor genes listed in Table 1 useful for practicing this invention in soybean. The soybean orthologs include genes encoded by SEQ ID NOs: 141-164 (Table 11) and reducing their expression alone or in combinations in soybean to improve soybean performance is included in the scope of this invention. Additional homologs to the soybean genes SEQ ID NOs: 141-164 are provided as SEQ ID NOs: 722-741 (Table 11) and reducing their expression alone or in combination with the 24 soybean orthologs of the switchgrass dTFs to improve soybean performance is included in the scope of this invention.

[0124] Disclosed herein are the canola orthologs of the 24 switchgrass transcription factor genes listed in Table 1 useful for practicing this invention in canola. The canola orthologs include genes encoded by SEQ ID NOs: 165-188 (Table 12) and reducing their expression alone or in combinations in canola to improve canola performance is included in the scope of this invention.

[0125] Disclosed herein are the rice orthologs of the 24 switchgrass transcription factor genes listed in Table 1 useful for practicing this invention in rice. The rice orthologs include genes encoded by SEQ ID NOs: 189-212 (Table 12) and reducing their expression alone or in combinations in rice to improve rice performance is included in the scope of this invention.

[0126] Disclosed herein are the alfalfa orthologs of the 24 switchgrass transcription factor genes listed in Table 1 useful for practicing this invention in alfalfa. The genome sequence for alfalfa (Medicago sativa) is not publically available. The sequence of a close relative to alfalfa, Medicago truncatula was used to find the orthologs to the 24 switchgrass transcription factor genes listed in Table 1. Once the genome sequence of alfalfa (Medicago sativa) is publically available, the alfalfa orthologs can be found by comparison with the Medicago truncatula and switchgrass genes. The Medicago truncatula orthologs include genes encoded by SEQ ID NOs: 213-236 and 762 (Table 13) and reducing the expression of orthologous genes alone or in combinations in alfalfa to improve alfalfa performance is included in the scope of this invention.

[0127] Disclosed herein are the sorghum orthologs of the 24 switchgrass transcription factor genes listed in Table 1 useful for practicing this invention in sorghum. The sorghum orthologs include genes encoded by SEQ ID NOs: 237-260 (Table 13) and reducing their expression alone or in combinations in sorghum to improve sorghum performance is included in the scope of this invention.

[0128] Disclosed herein are the wheat orthologs of the 24 switchgrass transcription factor genes listed in Table 1 useful for practicing this invention in wheat. The wheat orthologs includes genes encoded by SEQ ID NOs: 261-284 (Table 14) and reducing their expression alone or in combinations in wheat to improve wheat performance is included in the scope of this invention. Two additional homologs to the wheat dTF22 gene (SEQ ID NO: 282) are provided as SEQ ID NOs: 287 and 288 (Table 14), and reducing their expression alone or in combination with the 24 wheat orthologs of the switchgrass dTFs to improve wheat performance is included in the scope of this invention.

[0129] Disclosed herein is the Camelina sativa ortholog of dTF22. The Camelina ortholog includes the gene encoded by SEQ ID NO: 285 (Table 15). Identifying the Camelina orthologs of dTF1-dTF21, dTF59, and dTF60 and reducing their expression alone or in combinations in Camelina to improve Camelina performance is included in the scope of this invention.

[0130] It will be apparent for anyone skilled in the art to use the genes and the proteins encoded by the genes identified by SEQ ID Nos: 1-24, 35-117, 141-285, 287-288, 544, 545, 722-741, and 762 to identify additional orthologs of the transcription factors from the same crop or equivalent transcription factors genes in any other crop species which will be useful for practicing the invention in a crop-specific manner in any crop.

[0131] In an embodiment the expression of one or more of the transcription factor genes listed for each crop species in Tables 1, 5, 6, 8, 10-15 are modified to reduce the expression of the transcription factor in the crop of interest and the performance of the crop is improved.

[0132] In an embodiment, the expression of the transcription factor dTF22 encoded by SEQ ID NO: 22 in switchgrass or (SEQ ID NO: 210) in rice, (SEQ ID NO: 56) corn, (SEQ ID NO: 162) in soybean, (SEQ ID NO: 186) in Brassica napus, (SEQ ID NO: 285) in Camelina sativa, (SEQ ID NO: 234) in Medicago truncatula, (SEQ ID NO: 258) in Sorghum bicolor, or (SEQ ID NO: 282) in wheat is reduced in the respective species and the performance of the plant is improved.

[0133] In an embodiment, the expression of one or more of the transcription factors encoded by SEQ ID NO: 282, SEQ ID NO: 287, and/or SEQ ID NO: 288 in wheat is reduced and the performance of the plant is improved.

[0134] In an embodiment, the expression of one or more of the transcription factors encoded by SEQ ID NO: 162 and/or SEQ ID NO: 741 in soybean is reduced and the performance of the plant is improved.

[0135] In an embodiment, the expression of one or more of the transcription factors encoded by SEQ ID NO: 56, SEQ ID NO: 76, SEQ ID NO: 93, and/or SEQ ID NO: 109 in maize is reduced and the performance of the plant is improved.

[0136] In an embodiment, the expression of one or more of the transcription factors encoded by SEQ ID NO: 210, SEQ ID NO: 544, and/or SEQ ID NO: 545 in rice is reduced and the performance of the plant is improved.

[0137] In an embodiment the expression of two or more of the transcription factor genes listed for each crop species Tables 1, 5, 6, 8, 10-15 are modified to reduce the expression of the transcription factor genes in the crop of interest and the performance of the crop is improved.

[0138] In an embodiment the expression of three or more of the transcription factor genes listed in Tables 1, 5, 6, 8, 10-15 are modified to reduce the expression of the transcription factor genes in the crop of interest and the performance of the crop is improved.

[0139] In an embodiment the expression of four or more of the transcription factor genes listed for each crop species in Tables 1, 5, 6, 8, 10-15 are modified to reduce the expression of the transcription factor genes in the crop of interest and the performance of the crop is improved.

[0140] In an embodiment the expression of five or more of the transcription factor genes listed for each crop species in Tables 1, 5, 6, 8, 10-15 are modified to reduce the expression of the transcription factor genes in the crop of interest and the performance of the crop is improved.

[0141] In an embodiment, the expression of the transcription factor is downregulated by Log 2 Fold≤−1 in at least two of the three STR1, STF1 and BMY1 transgenic switchgrass lines presented in Table 1 and at least downregulated in the third transgenic line.

[0142] In an embodiment, the expression of the transcription factor is downregulated by Log 2 Fold≤−1 in at least one of the three STR1, STF1 and BMY1 transgenic switchgrass lines presented in Table 1 and at least downregulated in the other two transgenic lines.

[0143] Preferred transcription factors of the invention are disclosed based on fold-change in Table 1. Example 1 shows dTF22 is downregulated by all 3 global TFs: STR1, BMY1, and STIF1 and where the down regulation is at least 2-fold change in expression. At least one of the global TFs: STR1, BMY1, and STIF1 downregulates the following dTF3, dTF9, dTF10, dTF14, dTF18 and dTF60. STR1 and BMY downregulate one or more of dTF1, dTF3, dTF7, and dTF22.

[0144] In some embodiments, the polynucleotide is downregulated by techniques are said of various new technologies developed and/or used to create new characteristics in plants through genetic variation, the aim being targeted mutagenesis, targeted introduction of new genes or gene silencing (RdDM). Examples of such new breeding techniques are targeted sequence changes facilitated through the use of Zinc finger nuclease (ZFN) technology (ZFN-1, ZFN-2 and ZFN-3, see U.S. Pat. No. 9,145,565, incorporated by reference in its entirety), Oligonucleotide directed mutagenesis (ODM), Cisgenesis and intragenesis, RNA-dependent DNA methylation (RdDM, which does not necessarily change nucleotide sequence but can change the biological activity of the sequence), Grafting (on GM rootstock), Reverse breeding, Agro-infiltration (agro-infiltration “sensu stricto”, agro-inoculation, floral dip), Transcription Activator-Like Effector Nucleases (TALENs, see U.S. Pat. Nos. 8,586,363 and 9,181,535, incorporated by reference in their entireties), the CRISPR/Cas system (see U.S. Pat. Nos. 8,697,359; 8,771,945; 8,795,965; 8,865,406; 8,871,445; 8,889,356; 8,895,308; 8,906,616; 8,932,814; 8,945,839; 8,993,233; and 8,999,641), engineered meganuclease re-engineered homing endonucleases, DNA guided genome editing (Gao et al., Nature Biotechnology (2016), doi: 10.1038/nbt.3547, incorporated by reference in its entirety), and synthetic genomics. A complete description of each of these techniques can be found in the report made by the Joint Research Center (JRC) Institute for Prospective Technological Studies of the European Commission in 2011 and titled “New plant breeding techniques—State-of-the-art and prospects for commercial development”.

[0145] Modulation of candidate dTF genes are performed through known techniques in the art, such as without limitation, by genetic means, enzymatic techniques, chemicals methods, or combinations thereof. Inactivation may be conducted at the level of DNA, mRNA or protein, and inhibit the expression of one or more candidate dTF genes or the corresponding activity. Preferred inactivation methods affect the expression of the dTF gene and lead to the absence of gene product in the plant cells. It should be noted that the inhibition can be transient or permanent or stable. Inhibition of the protein can be obtained by suppressing or decreasing its activity or by suppressing or decreasing the expression of the corresponding gene. Inhibition can be obtained via mutagenesis of the dTF22 gene. For example, a mutation in the coding sequence can induce, depending upon the nature of the mutation, expression of an inactive protein, or of a reduced-active protein; a mutation at a splicing site can also alter or abolish the protein's function; a mutation in the promoter sequence can induce the absence of expression of said protein, or the decrease of its expression. Mutagenesis can be performed, e.g., by suppressing all or part of the coding sequence or of the promoter, or by inserting an exogenous sequence, e.g., a transposon, into said coding sequence or said promoter. It can also be performed by inducing point mutations, e.g., using ethyl methanesulfonate (EMS) mutagenesis or radiation. The mutated alleles can be detected, e.g., by PCR, by using specific primers of the gene. Rodriguez-Leal et al. describe a promoter editing method that generates a pool of promoter variants that can be screened to evaluate their phenotypic impact (Rodriguez-Leal et al., 2017, Cell, 171, 1-11). This method can be incorporated to downregulate native promoters of each dTF in the crop of interest.

[0146] Various high-throughput mutagenesis and splicing methods are described in the prior art. By way of examples, we may cite “TILLING” (Targeting Induced Local Lesions In Genome)-type methods, described by Till, Comai and Henikoff (2007) (R. K. Varshney and R. Tuberosa (eds.), Genomics-Assisted Crop Improvement: Vol. 1: Genomics Approaches and Platforms, 333-349.).

[0147] Plants comprising a mutation in the candidate dTF genes that induce inhibition of the protein product are also part of the goal. This mutation can be, e.g., a deletion of all or part of the coding sequence or of the promoter, or it may be a point mutation of said coding sequence or of said promoter.

[0148] Advantageously, inhibition of the dTF protein is obtained by silencing or by knock-out techniques on the dTF gene. Various techniques for silencing genes in plants are known. Antisense inhibition or co suppression, described, e.g., in Hamilton and Baulcombe, 1999, Science, vol 286, pp 950-952, is noteworthy. It is also possible to use ribozymes targeting the mRNA of one or more dTF protein. Preferably, silencing of the dTF gene is induced by RNA interference targeting said gene. An interfering RNA (iRNA) is a small RNA that can silence a target gene in a sequence-specific way. Interfering RNA include, specifically, “small interfering RNA” (siRNA) and micro-RNA (miRNA). The most widely-used constructions lead to the synthesis of a pre-miRNA in which the target sequence is present in sense and antisense orientation and separated by a short spacing region. The sense and antisense sequence can hybridize together leading to the formation of a hairpin structure called the pre miRNA. This hairpin structure is maturated leading to the production of the final miRNA. This miRNA will hybridize to the target mRNA which will be cleaved or degraded, as described in Schwab et al (Schwab et al, 2006 The Plant Cell, Vol. 18, 1121-1133) or in Ossowski et al (Ossowski et al, 2008, The plant Journal 53, 674-690).

[0149] Inhibition of the dTF proteins can also be obtained by gene editing of the candidate dTF genes. Various methods can be used for gene editing, by using transcription activator-like effector nucleases (TALENs), clustered Regularly Interspaced Short Palindromic Repeats (CRISPR/Cas9) or zinc-finger nucleases (ZFN) techniques (as described in Belhaj et al, 2013, Plant Methods, vol 9, p 39, Chen et al, 2014 Methods Volume 69, Issue 1, p 2-8). Preferably, the inhibition of a dTF protein is obtained by using Clustered Regularly Interspaced Short Palindromic Repeats (CRISPR/Cas9) or CRISPR/Cpf1. The use of this technology in genome editing is well described in the art, for example in Fauser et al. (Fauser et al, 2014, The Plant Journal, Vol 79, p 348-359), and references cited herein. In short, CRISPR is a microbial nuclease system involved in defense against invading phages and plasmids. CRISPR loci in microbial hosts contain a combination of CRISPR-associated (Cas) genes as well as non-coding RNA elements capable of programming the specificity of the CRISPR-mediated nucleic acid cleavage (sgRNA). At least classes (Class I and II) and six types (Types I-VI) of Cas proteins have been identified across a wide range of bacterial hosts. One key feature of each CRISPR locus is the presence of an array of repetitive sequences (direct repeats) interspaced by short stretches of non-repetitive sequences (spacers). The non-coding CRISPR array is transcribed and cleaved within direct repeats into short crRNAs containing individual spacer sequences, which direct Cas nucleases to the target site (protospacer). The Type II CRISPR/Cas is one of the most well characterized systems and carries out targeted DNA double-strand break in four sequential steps. First, two non-coding RNA, the pre-crRNA array and tracrRNA, are transcribed from the CRISPR locus. Second, tracrRNA hybridizes to the repeat regions of the pre-crRNA and mediates the processing of pre-crRNA into mature crRNAs containing individual spacer sequences. Third, the mature crRNA: tracrRNA complex directs Cas9 to the target DNA via Watson-Crick base-pairing between the spacer on the crRNA and the protospacer on the target DNA next to the protospacer adjacent motif (PAM), an additional requirement for target recognition. Finally, Cas9 mediates cleavage of target DNA to create a double-stranded break within the protospacer. Cas9 is thus the hallmark protein of the Type II CRISPR-Cas system, and a large monomeric DNA nuclease guided to a DNA target sequence adjacent to the PAM (protospacer adjacent motif) sequence motif by a complex of two noncoding RNAs: CRISPR RNA (crRNA) and trans-activating crRNA (tracrRNA). The Cas9 protein contains two nuclease domains homologous to RuvC and HNH nucleases. The HNH nuclease domain cleaves the complementary DNA strand whereas the RuvC-like domain cleaves the non-complementary strand and, as a result, a blunt cut is introduced in the target DNA. Heterologous expression of Cas9 together with an sgRNA can introduce site-specific double strand breaks (DSBs) into genomic DNA of live cells from various organisms. For applications in eukaryotic organisms, codon optimized versions of Cas9, which is originally from the bacterium Streptococcus pyogenes, have been used. The single guide RNA (sgRNA) is the second component of the CRISPR/Cas system that forms a complex with the Cas9 nuclease. sgRNA is a synthetic RNA chimera created by fusing crRNA with tracrRNA. The sgRNA guide sequence located at its 5′ end confers DNA target specificity. Therefore, by modifying the guide sequence, it is possible to create sgRNAs with different target specificities. The canonical length of the guide sequence is 20 bp. In plants, sgRNAs have been expressed using plant RNA polymerase III promoters, such as U6 and U3. Cas9 expression plasmids for use in the methods of the invention can be constructed as described in the art.

[0150] The absence of or loss of function in modified engineered plants or plant cells can be verified based on the phenotypic characteristics of their offspring; homozygous plants or plant cells for a mutation inactivating the dTF gene have a content of gene product rate that is lower than that of the wild plants (not carrying the mutation in the gene) from which they originated. Alternatively, a desirable phenotypic characteristic such as biomass yield, seed yield, or seed oil content is measured and is at least 10% higher, preferably at least 20% higher, at least preferably 30% higher, preferably at least 40% higher, preferably at least 50% higher than that of the control plants from which they originated. More preferably, seed yield or seed oil content is at least 60% higher, at least 70% higher, at least 80% higher, at least 90% higher than that of the control plants from which they originated. More preferably, seed yield or seed oil content is at least 100% higher, at least 150% higher, at least 200% higher than that of the control plants from which they originated.

[0151] The expression of the target gene or genes in the crops of interest can be reduced by any method known in the art, including the transgene based expression of anti-sense RNA or interfering RNA (RNAi) e.g., siRNA or miRNA or through genome editing to modify the DNA sequence of the genes disclosed herein directly in the plant cell chromosome.

[0152] Genome editing is a preferred method for practicing this invention. As used herein the terms “genome editing,” “genome edited,” and “genome modified” are used interchangeably to describe plants with specific DNA sequence changes in their genomes wherein those DNA sequence changes include changes of specific nucleotides, the deletion of specific nucleotide sequences or the insertion of specific nucleotide sequences.

[0153] As used herein “method for genome editing” includes all methods for genome editing technologies to precisely remove genes, gene fragments, to insert new DNA sequences into genes, to alter the DNA sequence of control sequences or protein coding regions to reduce or increase the expression of target genes in plant genomes (Belhaj, K. 2013, Plant Methods, 9, 39; Khandagale & Nadal, 2016, Plant Biotechnol Rep, 10, 327). Preferred methods involve the in vivo site-specific cleavage to achieve double stranded breaks in the genomic DNA of the plant genome at a specific DNA sequence using nuclease enzymes and the host plant DNA repair system. There are multiple methods to achieve double stranded breaks in genomic DNA, and thus achieve genome editing, including the use of zinc finger nucleases (ZFN), transcription activator-like effector nucleases (TALENs), engineered meganucleases, and the CRISPR/Cas system (CRISPR is an acronym for clustered, regularly interspaced, short, palindromic repeats and Cas an abbreviation for CRISPR-associated protein) (for review see Khandagal & Nadal, Plant Biotechnol Rep, 2016, 10, 327). US Patent Application 2016/0032297 to Dupont describes these methods in detail. In some cases, the sequence specificity for the target gene in the plant genome is dependent on engineering specific nuclease like zinc finger nucleases (ZFN), which include an engineered DNA-binding zinc finger domain linked to a non-specific endonuclease domain such as FokI, or Tal effector nuclease (TALENS) to recognize the target DNA sequence in the plant genome. The CRISPR/Cas genome editing system is a preferred method because of its sequence targeting flexibility. This technology requires a source of the Cas enzyme and a short single guide RNA (sgRNA, ˜20 bp), DNA, RNA/DNA hybrid or double stranded DNA guide with sequence homology to the target DNA sequence in the plant genome to direct the Cas enzyme to the desired cut site for cleavage and a recognition sequence for binding the Cas enzyme. As used herein the term Cas nuclease includes any nuclease which site-specifically recognizes CRISPR sequences based on guide RNA or DNA sequences and includes Cas9, Cpf1 and others described below. CRISPR/Cas genome editing, is a preferred way to edit the genomes of complex organisms (Sander & Joung, 2013, Nat Biotech, 2014, 32, 347; Wright et al., 2016, Cell, 164, 29) including plants (Zhang et al., 2016, Journal of Genetics and Genomics, 43, 151; Puchta, H., 2016, Plant J., 87, 5; Khandagale & Nadaf, 2016, PLANT BIOTECHNOL REP, 10, 327). US Patent Application 2016/020822 to Dupont has an extensive description of the materials and methods useful for genome editing in plants using the CRISPR Cas9 system and describes many of the uses of the CRISPR/Cas9 system for genome editing of a range of gene targets in crops.

[0154] There are many variations of the CRISPR/Cas system that can be used for this technology including the use of wild-type Cas9 from Streptococcus pyogenes (Type II Cas) (Barakate & Stephens, 2016, Frontiers in Plant Science, 7, 765; Bortesi & Fischer, 2015, Biotechnology Advances 5, 33, 41; Cong et al., 2013, Science, 339, 819; Rani et al., 2016, Biotechnology Letters, 1-16; Tsai et al., 2015, Nature biotechnology, 33, 187), the use of a Tru-gRNA/Cas9 in which off-target mutations were significantly decreased (Fu et al., 2014, Nature biotechnology, 32, 279; Osakabe et al., 2016, Scientific Reports, 6, 26685; Smith et al., 2016, Genome biology, 17, 1; Zhang et al., 2016, Scientific Reports, 6, 28566), a high specificity Cas9 (mutated S. pyogenes Cas9) with little to no off target activity (Kleinstiver et al., 2016, Nature 529, 490; Slaymaker et al., 2016, Science, 351, 84), the Type I and Type III Cas Systems in which multiple Cas proteins need to be expressed to achieve editing (Li et al., 2016, Nucleic acids research, 44:e34; Luo et al., 2015, Nucleic acids research, 43, 674), the Type V Cas system using the Cpf1 enzyme (Kim et al., 2016, Nature biotechnology, 34, 863; Toth et al., 2016, Biology Direct, 11, 46; Zetsche et al., 2015, Cell, 163, 759), DNA-guided editing using the NgAgo Argonaute enzyme from Natronobacterium gregoryi that employs guide DNA (Xu et al., 2016, Genome Biology, 17, 186), and the use of a two vector system in which Cas9 and gRNA expression cassettes are carried on separate vectors (Cong et al., 2013, Science, 339, 819). A unique nuclease Cpf1, an alternative to Cas9 has advantages over the Cas9 system in reducing off-target edits which creates unwanted mutations in the host genome. Examples of crop genome editing using the CRISPR/Cpf1 system include rice (Tang et. al., 2017, Nature Plants 3, 1-5; Wu et. al., 2017, Molecular Plant, Mar. 16, 2017) and soybean (Kim et., al., 2017, Nat Commun. 8, 14406).

[0155] Methods for constructing the genome modified plant cells and plants include introducing into plant cells a site-specific nuclease to cleave the plant genome at the target site or target sites and the guide sequences. Modification to the DNA sequence at the cleavage site then occur through the plant cells natural DNA repair processes. In a preferred case using the CRISPR system the target site in the plant genome is determined by providing guide RNA sequences.

[0156] A “guide polynucleotide” also relates to a polynucleotide sequence that can form a complex with a Cas endonuclease and enables the Cas endonuclease to recognize and optionally cleave a DNA target site. The guide polynucleotide can be a single molecule or a double molecule. The guide polynucleotide sequence can be a RNA sequence, a DNA sequence, or a combination thereof (a RNA-DNA combination sequence).

[0157] As used herein “guide RNA” sequences comprise a variable targeting domain, homologous to the target site in the genome and an RNA sequence that interacts with the Cas9 or Cpf1 endonuclease. This variable targeting domain is referred to herein and within the examples as a “guide targeting sequence”. A guide polynucleotide that solely comprises ribonucleic acids is also referred to as a “guide RNA”.

[0158] Preferred embodiments include multiplex of gene edits. The method also provides introducing single-guide RNAs (sgRNAs) into plants. The guide RNAs (sgRNAs) include nucleotide sequences that are complementary to the target chromosomal DNA. The sgRNAs can be, for example, engineered single chain guide RNAs that comprise a crRNA sequence (complementary to the target DNA sequence) and a common tracrRNA sequence, or as crRNA-tracrRNA hybrids. The sgRNAs can be introduced into the cell or the organism as a DNA with an appropriate promoter, as an in vitro transcribed RNA, or as a synthesized RNA. Methods for designing the guide RNAs for any target gene of interest are well known in the art as described for example by Brazelton et al. (Brazelton, V. A. et al., 2015, GM Crops & Food, 6, 266-276) and Zhu (Zhu, L. J. 2015, Frontiers in Biology, 10, 289-296).

[0159] Target Sequence for Reducing Expression

[0160] Examples of mutations that may lead to a reduced activity of the dTF protein are mutations to the coding sequence that give rise to premature stop codons, frame shifts or amino acid changes in the encoded protein. A single guide RNA can be used where the objective is to change a relatively small number of base pairs in the DNA and for example introduce frame-shift mutations resulting in the expression of an inactive or reduced activity protein. Premature stop codons typically lead to the expression of a truncated version of the encoded protein. Depending on the position of the mutation in the coding sequence, a truncated version of a protein may lack one or more domains that are essential to perform its function and/or to interact with substrates or with other proteins, and/or it may lack the ability to fold properly into a functional protein.

[0161] In certain preferred embodiments, the guide polynucleotide/Cas endonuclease system can be used to allow for the deletion of a promoter or promoter element of any one the dTF sequences of the invention, wherein the promoter deletion (or promoter element deletion) results in any one of the following or any one combination of the following: a permanently inactivated gene locus, an increased promoter activity (increased promoter strength), an increased promoter tissue specificity, a decreased promoter activity, a decreased promoter tissue specificity, a new promoter activity, an inducible promoter activity, an extended window of gene expression, a modification of the timing or developmental progress of gene expression, a mutation of DNA binding elements and/or an addition of DNA binding elements. Promoter elements to be deleted can be, but are not limited to, promoter core elements, promoter enhancer elements or 35 S enhancer elements (CaMV35S enhancers (Benfey et al, EMBO J, August 1989; 8(8): 2195-2202)). The promoter or promoter fragment to be deleted can be endogenous, artificial, pre-existing, or transgenic to the cell that is being edited.

[0162] In another embodiment, the guide polynucleotide/Cas endonuclease system can be used to allow for the deletion of a terminator or terminator element of any one the dTF sequences of the invention, wherein the terminator deletion (or terminator element deletion) results in any one of the following or any one combination of the following: an increased terminator activity (increased terminator strength), an increased terminator tissue specificity, a decreased terminator activity, a decreased terminator tissue specificity, a mutation of DNA binding elements and/or an addition of DNA binding elements. The terminator or terminator fragment to be deleted can be endogenous, artificial, pre-existing, or transgenic to the cell that is being edited.

[0163] In yet another embodiment, the genomic sequence of interest to be modified is an intron site of any one the dTF sequences of the invention, wherein the modification consists of inserting an intron enhancing motif into the intron which results in modulation of the transcriptional activity of the gene comprising said intron.

[0164] In a further embodiment, methods provide for modifying alternative splicing sites of any one the dTF sequences of the invention resulting in enhanced production of the functional gene transcripts and gene products (proteins).

[0165] In additional embodiments, the modification of the dTF sequences of the invention include editing the intron borders of alternatively spliced genes to alter the accumulation of splice variants.

[0166] In other embodiments, the guide polynucleotide/Cas endonuclease system can be used to modify or replace a coding sequence of the dTF genome of a plant cell, wherein the modification or replacement results in any one of the following, or any one combination of the following: an increased protein (enzyme) activity, an increased protein functionality, a decreased protein activity, a decreased protein functionality, a site specific mutation, a protein domain swap, a protein knock-out, a new protein functionality, a modified protein functionality.

[0167] In some embodiments, the protein knockout is due to the introduction of a stop codon into the coding sequence of interest. In preferred embodiments, the protein knockout is due to the deletion of a start codon into the coding sequence of interest. In yet other embodiments, the guide polynucleotide/Cas endonuclease system can be used with or without a co-delivered polynucleotide sequence to fuse a first coding sequence encoding a nuclear localization signal to a second coding sequence encoding a protein of interest, wherein the protein fusion results in targeting the protein of interest to the nuclease.

[0168] The guide RNA/Cas endonuclease system can be used to create frame shift mutations of any one of the dTF sequences of the invention. One or more guide RNAs are used to knockout the dTF genes after the Cas nuclease makes a double strand break and the error prone DNA repair pathway, non-homologous end joining, corrects the break, creating a mutation. The most likely result is a frameshift mutation that would knockout the gene. The targeting strategy involves finding proto-spacers in the exons of the gene that had a PAM sequence, NGG, and was unique in the genome.

[0169] The guide RNA/Cas endonuclease system can be used to allow for the deletion of a promoter element from any one of the dTF sequences of the invention. Promoter elements, such as enhancer elements, are often introduced in promoters driving gene expression cassettes in multiple copies for trait gene testing or to produce transgenic plants expressing specific trait. Enhancer elements can be, but are not limited to, a 35S enhancer element (Benfey et al, EMBO J, August 1989; 8(8): 2195-2202). In some plants (events), the enhancer elements can cause an unwanted phenotype, a yield drag, or a change in expression pattern of the trait of interest that is not desired. It may be desired to remove the extra copies of the enhancer element while keeping the trait gene cassettes intact at their integrated genomic location. The guide RNA/Cas endonuclease can be used to remove the unwanted enhancing element from the plant genome. A guide RNA can be designed to contain a variable targeting region, or “guide target sequence” targeting a sequence of 12-30 bps adjacent to a NGG (PAM) in the enhancer. The Cas endonuclease can make cleavage to remove one or multiple enhancers. The guide RNA/Cas endonuclease system can be introduced by either Agrobacterium or particle gun bombardment. Alternatively, two different guide RNAs (targeting two different genomic target sites) can be used to remove multiple enhancer elements from the genome of a plant.

[0170] In some embodiments, the genome modified plant has improved performance as compared to a plant of the same type which does not have the genome modification. The improved performance of the genome modified plant includes for example, higher photosynthesis rates, reduced photorespiration rates, higher biomass yield, higher seed yield, improved harvest index, higher oil content, improved nutritional composition, drought resistance, flood resistance, disease resistance, faster seed germination and plant emergence, and/or improved seedling vigor. The genome modified plant can have a CO₂ assimilation rate that is higher than for a corresponding control plant not comprising the genome modification. For example, the genome modified plant can have a CO₂ assimilation rate that is at least 5% higher, at least 10% higher, at least 20% higher, at least 40% higher, at least 60% higher, at least 100% higher, at least 200% higher or at least 400% higher than for a corresponding control plant not comprising the genome modification.

[0171] The genome modified plant can also have a transpiration rate that is lower than for a corresponding control plant not comprising the genome modification. For example, the genome modified plant can have a transpiration rate that is at least 5% lower, at least 10% lower, at least 20% lower, at least 40% lower, at least 60% lower or at least 100% lower than for a corresponding control plant not comprising the genome modification.

[0172] The genome modified plant can have a seed yield or a seed oil content that is higher than for a corresponding control plant not comprising the genome modification. For example, the genome modified plant can have a seed yield or seed oil content that is at least 5% higher, at least 10% higher, at least 20% higher, at least 40% higher, at least 60% higher, at least 80% higher or at least 100% higher, than for a corresponding control plant not comprising the genome modification.

[0173] The genome modified plant can have a seed yield that is higher than for a corresponding control plant not comprising the genome modification. For example, the genome modified plant can have a seed yield that is at least 5% higher, at least 10% higher, at least 20% higher, at least 40% higher, at least 60% higher, at least 80% higher or at least 100% higher, than for a corresponding control plant not comprising the genome modification.

[0174] Plants of Interest

[0175] Plants encompass all annual and perennial monocotyledonous or dicotyledonous plants. Preferred dicotyledonous plants are selected in particular from the dicotyledonous crop plants such as sunflower, lettuce, the genus Brassica, very particularly the species napus (oilseed rape), campestris (beet), oleracea cv Tastie (cabbage), oleracea cv Snowball Y (cauliflower) and oleracea cv Emperor (broccoli), cabbage, melon, pumpkin/squash or zucchini and others; soybean, alfalfa, pea, beans, peanut, tomato, potato, sweet potato, yams carrot, flax, cotton, hemp, cucumber, spinach, carrot, sugar beet and the various tree, nut and grapevine species, in particular banana and kiwi fruit. Preferred monocotyledonous plants include maize, rice, wheat, sugarcane, sorghum, oats and barley.

[0176] Of interest are oilseed plants including Camelina (false flax); Brassica species such as B. campestris, B. napus, B. rapa, B. carinata (mustard, oilseed rape or turnip rape); Cannabis sativa (hemp); Carthamus tinctorius (safflower); Cocos nucifera (coconut); Crambe abyssinica (crambe); Elaeis guinensis (African oil palm); Elaeis oleifera (American oil palm); Glycine max (soybean); Gossypium hirsutum (American cotton); Gossypium barbadense (Egyptian cotton); Gossypium herbaceum (Asian cotton); Helianthus annuus (sunflower); Jatropha curcas (jatropha); Linum usitatissimum (linseed or flax); Oenothera biennis (evening primrose); Olea europaea (olive); Oryza sativa (rice); Ricinus communis (castor); Sesamum indicum (sesame); Thlaspi caerulescens (pennycress); Triticum species (wheat); Zea mays (maize or corn), and various nut species such as, for example, walnut or almond.

[0177] Plants selected from the group, corn (maize), sugarcane, sorghum, millet, cassava, soybean, canola, cotton, wheat, rice, potato, tomato, pulses, vegetables, sunflower, safflower and Camelina are examples of particularly useful plants for performance improvement using the methods, target genes for altered expression to achieve improved plant performance and genome inserts to alter the expression of the target gene(s) are disclosed herein.

[0178] Transcription factor genes, including crop-specific transcription factor gene sequences in preferred crop species useful as targets for down regulation, alone or in combinations, to improve crop performance are described herein. Methods of downregulating these genes in these crops including site-specific nucleases, guide RNAs, guide RNA-DNA hybrids and guide DNAs, DNA constructs useful in the methods are described herein. Methods for introducing the site-specific nuclease and guide RNAs into plant cells and plant tissues are also described herein and methods for identifying plant cells, plant tissue and fertile plants having reduced expression of the transcription factor genes made using these methods are disclosed herein. As used herein, “transgenic” refers to an organism in which a nucleic acid fragment containing a heterologous or non-native” nucleotide sequence has been introduced. The genome inserts introduced into the plants are stable, inheritable and impart improved plant performance.

[0179] Modified Plant Genomes Using CRISPR/Cas, Guide RNAs

[0180] Examples of simultaneous CRISPR/Cas9 or CRISPR/Cpf1 gene editing at multiple target sites, or multiplex genome editing, have been described for both mammalian cells and plants, and can be achieved by expressing one or more sgRNAs to target multiple genome sites within the organism. This has been demonstrated in rice with the use of seven sgRNAs for editing (Ma et al., 2015, Mol Plant, 8, 1274). It is therefore an objective of this invention to use multiple sgRNAs to direct the insertion of a specific DNA sequence to multiple sites in the plant genome using one or more of the previous embodiments of the invention. Example 3 provides inactivation of dTF22 expression.

[0181] Methods for DNA Modification at the Target Site

[0182] The methods for achieving the genome modification are described using the CRISPR/Cas9 system although it will be appreciated that other variations of the CRISPR/Cas9 system can also be used including one that uses guide DNA sequences. The method requires the introduction of the site-specific nuclease and guide RNA into the nucleus of plant cells from the target crop. These may vary for different crop species or due to preference or skill set of the crop scientists.

[0183] One skilled in the art can produce and introduce proteins or DNA into many crop types using plant cell protoplasts. Preferably the plant protoplasts once genome edited can be regenerated into stable fertile plants suitable for crop breeding programs. For example, protoplast transformation and hence genome editing is useful for modifying the genomes of Camelina, as disclosed herein but also for canola, soybean, corn, rice, wheat, potato, alfalfa, tomato, cotton, barley and many other crops of interest. The Cas9 nuclease enzyme can be combined with the gRNAs and protein/RNA particles which can then be introduced into the plant protoplasts.

[0184] Methods for Identifying or Selecting Plant Cells with the Targeted Genome Edits

[0185] Methods of Plant Transformation

[0186] Known transformations methods can be used downregulate one or more gene sequences of the invention.

[0187] Vectors

[0188] Several plant transformation vector options are available, including those described in Gene Transfer to Plants, 1995, Potrykus et al., eds., Springer-Verlag Berlin Heidelberg New York, Transgenic Plants: A Production System for Industrial and Pharmaceutical Proteins, 1996, Owen et al., eds., John Wiley & Sons Ltd. Eng, and Methods in Plant Molecular Biology: A Laboratory Course Manual, 1995, Maliga et al., eds., Cold Spring Laboratory Press, New York. Plant transformation vectors generally include one or more coding sequences of interest under the transcriptional control of 5′ and 3′ regulatory sequences, including a promoter, a transcription termination and/or polyadenylation signal, and a selectable or screenable marker gene.

[0189] Many vectors are available for transformation using Agrobacterium tumefaciens. These typically carry at least one T-DNA sequence and include vectors such as pBIN19. Typical vectors suitable for Agrobacterium transformation include the binary vectors pCIB200 and pCIB2001, as well as the binary vector pCIB 10 and hygromycin selection derivatives thereof (See, for example, U.S. Pat. No. 5,639,949).

[0190] Transformation without the use of Agrobacterium tumefaciens circumvents the requirement for T-DNA sequences in the chosen transformation vector and consequently vectors lacking these sequences are utilized in addition to vectors such as the ones described above which contain T-DNA sequences. The choice of vector for transformation techniques that do not rely on Agrobacterium depends largely on the preferred selection for the species being transformed. Typical vectors suitable for non-Agrobacterium transformation include pCIB3064, pSOG 19, and pSOG35. (See, for example, U.S. Pat. No. 5,639,949). Alternatively, DNA fragments containing the transgene and the necessary regulatory elements for expression of the transgene can be excised from a plasmid and delivered to the plant cell using microprojectile bombardment-mediated methods.

[0191] Protocols

[0192] Transformation protocols as well as protocols for introducing nucleotide sequences into plants may vary depending on the type of plant or plant cell targeted for transformation. Suitable methods of introducing nucleotide sequences into plant cells and subsequent insertion into the plant genome include microinjection (Crossway et al. (1986) Biotechniques 4:320-334), electroporation (Riggs et al. (1986) Proc. Natl. Acad. Sci. USA 83:5602-5606), Agrobacterium-mediated transformation (Townsend et al., U.S. Pat. No. 5,563,055; Zhao et al. WO US98/01268), direct gene transfer (Paszkowski et al. (1984) EMBO J. 3:2717-2722), and ballistic particle acceleration (see, for example, Sanford et al., U.S. Pat. No. 4,945,050; Tomes et al. (1995) Plant Cell, Tissue, and Organ Culture: Fundamental Methods, ed. Gamborg and Phillips (Springer-Verlag, Berlin); and McCabe et al. Biotechnology 6:923-926 (1988)). Also see Weissinger et al. Ann. Rev. Genet. 22:421-477 (1988); Sanford et al. Particulate Science and Technology 5:27-37 (1987) (onion); Christou et al. Plant Physiol. 87:671-674 (1988) (soybean); McCabe et al. (1988) BioTechnology 6:923-926 (soybean); Finer and McMullen In Vitro Cell Dev. Biol. 27P:175-182 (1991) (soybean); Singh et al. Theor. Appl. Genet. 96:319-324 (1998)(soybean); Dafta et al. (1990) Biotechnology 8:736-740 (rice); Klein et al. Proc. Natl. Acad. Sci. USA 85:4305-4309 (1988) (maize); Klein et al. Biotechnology 6:559-563 (1988) (maize); Tomes, U.S. Pat. No. 5,240,855; Buising et al., U.S. Pat. Nos. 5,322,783 and 5,324,646; Tomes et al. (1995) in Plant Cell, Tissue, and Organ Culture: Fundamental Methods, ed. Gamborg (Springer-Verlag, Berlin) (maize); Klein et al. Plant Physiol. 91:440-444 (1988) (maize); Fromm et al. Biotechnology 8:833-839 (1990) (maize); Hooykaas-Van Slogteren et al. Nature 311:763-764 (1984); Bowen et al., U.S. Pat. No. 5,736,369 (cereals); Bytebier et al. Proc. Natl. Acad. Sci. USA 84:5345-5349 (1987) (Liliaceae); De Wet et al. in The Experimental Manipulation of Ovule Tissues, ed. Chapman et al. (Longman, N.Y.), pp. 197-209 (1985) (pollen); Kaeppler et al. Plant Cell Reports 9:415-418 (1990) and Kaeppler et al. Theor. Appl. Genet. 84:560-566 (1992) (whisker-mediated transformation); D'Halluin et al. Plant Cell 4:1495-1505 (1992) (electroporation); Li et al. Plant Cell Reports 12:250-255 (1993) and Christou and Ford Annals of Botany 75:407-413 (1995) (rice); Osjoda et al. Nature Biotechnology 14:745-750 (1996) (maize via Agrobacterium tumefaciens). References for protoplast transformation and/or gene gun for Agrisoma technology are described in WO 2010/037209. Methods for transforming plant protoplasts are available including transformation using polyethylene glycol (PEG), electroporation, and calcium phosphate precipitation (see for example Potrykus et al., 1985, Mol. Gen. Genet., 199, 183-188; Potrykus et al., 1985, Plant Molecular Biology Reporter, 3, 117-128). Methods for plant regeneration from protoplasts have also been described [Evans et al., in Handbook of Plant Cell Culture, Vol 1, (Macmillan Publishing Co., New York, 1983); Vasil, I K in Cell Culture and Somatic Cell Genetics (Academic, Oro, 1984)].

[0193] Transformation protocols as well as protocols for introducing nucleotide sequences into plants may vary depending on the type of plant or plant cell, i.e., monocot or dicot, targeted for transformation.

[0194] Suitable methods of introducing nucleotide sequences into plant cells and subsequent insertion into the plant genome are described in US 2010/0229256 A1 to Somleva & Ali and US 2012/0060413 to Somleva et al.

[0195] The transformed cells are grown into plants in accordance with conventional techniques. See, for example, McCormick et al., 1986, Plant Cell Rep. 5: 81-84. These plants may then be grown, and either pollinated with the same transformed variety or different varieties, and the resulting hybrid having constitutive expression of the desired phenotypic characteristic identified. Two or more generations may be grown to ensure that constitutive expression of the desired phenotypic characteristic is stably maintained and inherited and then seeds harvested to ensure constitutive expression of the desired phenotypic characteristic has been achieved.

[0196] Procedures for in planta transformation can be simple. Tissue culture manipulations and possible somaclonal variations are avoided and only a short time is required to obtain transgenic plants. However, the frequency of transformants in the progeny of such inoculated plants is relatively low and variable. At present, there are very few species that can be routinely transformed in the absence of a tissue culture-based regeneration system. Stable Arabidopsis transformants can be obtained by several in planta methods including vacuum infiltration (Clough & Bent, 1998, The Plant J. 16: 735-743), transformation of germinating seeds (Feldmann & Marks, 1987, Mol. Gen. Genet. 208: 1-9), floral dip (Clough and Bent, 1998, Plant J. 16: 735-743), and floral spray (Chung et al., 2000, Transgenic Res. 9: 471-476). Other plants that have successfully been transformed by in planta methods include rapeseed and radish (vacuum infiltration, Ian and Hong, 2001, Transgenic Res., 10: 363-371; Desfeux et al., 2000, Plant Physiol. 123: 895-904), Medicago truncatula (vacuum infiltration, Trieu et al., 2000, Plant J. 22: 531-541), camelina (floral dip, WO/2009/117555 to Nguyen et al.), and wheat (floral dip, Zale et al., 2009, Plant Cell Rep. 28: 903-913). In planta methods have also been used for transformation of germ cells in maize (pollen, Wang et al. 2001, Acta Botanica Sin., 43, 275-279; Zhang et al., 2005, Euphytica, 144, 11-22; pistils, Chumakov et al. 2006, Russian J. Genetics, 42, 893-897; Mamontova et al. 2010, Russian J. Genetics, 46, 501-504) and Sorghum (pollen, Wang et al. 2007, Biotechnol. Appl. Biochem., 48, 79-83).

[0197] Selection

[0198] Following transformation by any one of the methods described above, the following procedures can be used to obtain a transformed plant expressing the transgenes: select the plant cells that have been transformed on a selective medium; regenerate the plant cells that have been transformed to produce differentiated plants; select transformed plants expressing the DNA construct for introducing the targeted insertion of the DNA sequence elements producing the desired level of desired polypeptide(s) in the desired tissue and cellular location.

[0199] The cells that have been transformed may be grown into plants in accordance with conventional techniques. See, for example, McCormick et al. Plant Cell Reports 5:81-84 (1986). These plants may then be grown, and either pollinated with the same transformed variety or different varieties, and the resulting hybrid having constitutive expression of the desired phenotypic characteristic identified. Two or more generations may be grown to ensure that constitutive expression of the desired phenotypic characteristic is stably maintained and inherited and then seeds harvested to ensure constitutive expression of the desired phenotypic characteristic has been achieved.

[0200] Transgenic plants can be produced using conventional techniques to express any genes of interest in plants or plant cells (Methods in Molecular Biology, 2005, vol. 286, Transgenic Plants: Methods and Protocols, Pena L., ed., Humana Press, Inc. Totowa, N.J.; Shyamkumar Barampuram and Zhanyuan J. Zhang, Recent Advances in Plant Transformation, in James A. Birchler (ed.), Plant Chromosome Engineering: Methods and Protocols, Methods in Molecular Biology, vol. 701, Springer Science+Business Media). Typically, gene transfer, or transformation, is carried out using explants capable of regeneration to produce complete, fertile plants. Generally, a DNA or an RNA molecule to be introduced into the organism is part of a transformation vector. A large number of such vector systems known in the art may be used, such as plasmids. The components of the expression system can be modified, e.g., to increase expression of the introduced nucleic acids. For example, truncated sequences, nucleotide substitutions or other modifications may be employed. Expression systems known in the art may be used to transform virtually any plant cell under suitable conditions. A transgene comprising a DNA molecule encoding a gene of interest is preferably stably transformed and integrated into the genome of the host cells. Transformed cells are preferably regenerated into whole fertile plants. Detailed description of transformation techniques are within the knowledge of those skilled in the art.

[0201] Plant promoters can be selected to control the expression of the transgene in different plant tissues or organelles for all of which methods are known to those skilled in the art (Gasser & Fraley, 1989, Science 244: 1293-1299). In one embodiment, promoters are selected from those of eukaryotic or synthetic origin that are known to yield high levels of expression in plants and algae. In a preferred embodiment, promoters are selected from those that are known to provide high levels of expression in monocots.

[0202] Constitutive promoters include, for example, the core promoter of the Rsyn7 promoter and other constitutive promoters disclosed in WO 99/43838 and U.S. Pat. No. 6,072,050, the core CaMV 35S promoter (Odell et al., 1985, Nature 313: 810-812), rice actin (McElroy et al., 1990, Plant Cell 2: 163-171), ubiquitin (Christensen et al., 1989, Plant Mol. Biol. 12: 619-632; Christensen et al., 1992, Plant Mol. Biol. 18: 675-689), pEMU (Last et al., 1991, Theor. Appl. Genet. 81: 581-588), MAS (Velten et al., 1984, EMBO J. 3: 2723-2730), and ALS promoter (U.S. Pat. No. 5,659,026). Other constitutive promoters are described in U.S. Pat. Nos. 5,608,149; 5,608,144; 5,604,121; 5,569,597; 5,466,785; 5,399,680; 5,268,463; and 5,608,142.

[0203] “Tissue-preferred” promoters can be used to target gene expression within a particular tissue. Compared to chemically inducible systems, developmentally and spatially regulated stimuli are less dependent on penetration of external factors into plant cells. Tissue-preferred promoters include those described by Van Ex et al., 2009, Plant Cell Rep. 28: 1509-1520; Yamamoto et al., 1997, Plant J. 12: 255-265; Kawamata et al., 1997, Plant Cell Physiol. 38: 792-803; Hansen et al., 1997, Mol. Gen. Genet. 254: 337-343; Russell et al., 199), Transgenic Res. 6: 157-168; Rinehart et al., 1996, Plant Physiol. 112: 1331-1341; Van Camp et al., 1996, Plant Physiol. 112: 525-535; Canevascini et al., 1996, Plant Physiol. 112: 513-524; Yamamoto et al., 1994, Plant Cell Physiol. 35: 773-778; Lam, 1994, Results Probl. Cell Differ. 20: 181-196, Orozco et al., 1993, Plant Mol. Biol. 23: 1129-1138; Matsuoka et al., 1993, Proc. Natl. Acad. Sci. USA 90: 9586-9590, and Guevara-Garcia et al., 1993, Plant J. 4: 495-505. Such promoters can be modified, if necessary, for weak expression.

[0204] Any of the described promoters can be used to control the expression of one or more of the genes of the invention, their homologs and/or orthologs as well as any other genes of interest in a defined spatiotemporal manner.

[0205] Expression Cassettes

[0206] Nucleic acid sequences intended for expression in transgenic plants are first assembled in expression cassettes behind a suitable promoter active in plants. The expression cassettes may also include any further sequences required or selected for the expression of the transgene. Such sequences include, but are not restricted to, transcription terminators, extraneous sequences to enhance expression such as introns, vital sequences, and sequences intended for the targeting of the gene product to specific organelles and cell compartments. These expression cassettes can then be transferred to the plant transformation vectors described infra.

[0207] A variety of transcriptional terminators are available for use in expression cassettes. These are responsible for the termination of transcription beyond the transgene and the correct polyadenylation of the transcripts. Appropriate transcriptional terminators are those that are known to function in plants and include the CaMV 35S terminator, the tml terminator, the nopaline synthase terminator and the pea rbcS E9 terminator. These are used in both monocotyledonous and dicotyledonous plants.

[0208] Individual plants within a population of transgenic plants that express a recombinant gene(s) may have different levels of gene expression. The variable gene expression is due to multiple factors including multiple copies of the recombinant gene, chromatin effects, and gene suppression. Accordingly, a phenotype of the transgenic plant may be measured as a percentage of individual plants within a population. The yield of a plant can be measured simply by weighing. The yield of seed from a plant can also be determined by weighing. The increase in seed weight from a plant can be due to a number of factors, an increase in the number or size of the seed pods, an increase in the number of seed or an increase in the number of seed per plant. In the laboratory or greenhouse seed yield is usually reported as the weight of seed produced per plant and in a commercial crop production setting yield is usually expressed as weight per acre or weight per hectare.

[0209] A recombinant DNA construct including a plant-expressible gene or other DNA of interest is inserted into the genome of a plant by a suitable method. Suitable methods include, for example, Agrobacterium tumefaciens-mediated DNA transfer, direct DNA transfer, liposome-mediated DNA transfer, electroporation, co-cultivation, diffusion, particle bombardment, microinjection, gene gun, calcium phosphate coprecipitation, viral vectors, and other techniques. Suitable plant transformation vectors include those derived from a Ti plasmid of Agrobacterium tumefaciens. In addition to plant transformation vectors derived from the Ti or root-inducing (Ri) plasmids of Agrobacterium, alternative methods can be used to insert DNA constructs into plant cells. A transgenic plant can be produced by selection of transformed seeds or by selection of transformed plant cells and subsequent regeneration.

[0210] In one embodiment, the transgenic plants are grown (e.g., on soil) and harvested. In one embodiment, above ground tissue is harvested separately from below ground tissue. Suitable above ground tissues include shoots, stems, leaves, flowers, grain, and seed. Exemplary below ground tissues include roots and root hairs. In one embodiment, whole plants are harvested and the above ground tissue is subsequently separated from the below ground tissue.

[0211] Genetic constructs may encode a selectable marker to enable selection of transformation events. There are many methods that have been described for the selection of transformed plants [for review see (Miki et al., Journal of Biotechnology, 2004, 107, 193-232) and references incorporated within]. Selectable marker genes that have been used extensively in plants include the neomycin phosphotransferase gene nptII (U.S. Pat. Nos. 5,034,322, 5,530,196), hygromycin resistance gene (U.S. Pat. No. 5,668,298, Waldron et al., (1985), Plant Mol Biol, 5:103-108; Zhijian et al., (1995), Plant Sci, 108:219-227), the bar gene encoding resistance to phosphinothricin (U.S. Pat. No. 5,276,268), the expression of aminoglycoside 3″-adenyltransferase (aadA) to confer spectinomycin resistance (U.S. Pat. No. 5,073,675), the use of inhibition resistant 5-enolpyruvyl-3-phosphoshikimate synthetase (U.S. Pat. No. 4,535,060) and methods for producing glyphosate tolerant plants (U.S. Pat. Nos. 5,463,175; 7,045,684). Other suitable selectable markers include, but are not limited to, genes encoding resistance to chloramphenicol (Herrera Estrella et al., (1983), EMBO J, 2:987-992), methotrexate (Herrera Estrella et al., (1983), Nature, 303:209-213; Meijer et al, (1991), Plant Mol Biol, 16:807-820); streptomycin (Jones et al., (1987), Mol Gen Genet, 210:86-91); bleomycin (Hille et al., (1990), Plant Mol Biol, 7:171-176); sulfonamide (Guerineau et al., (1990), Plant Mol Biol, 15:127-136); bromoxynil (Stalker et al., (1988), Science, 242:419-423); glyphosate (Shaw et al., (1986), Science, 233:478-481); phosphinothricin (DeBlock et al., (1987), EMBO J, 6:2513-2518).

[0212] Methods of plant selection that do not use antibiotics or herbicides as a selective agent have been previously described and include expression of glucosamine-6-phosphate deaminase to inactive glucosamine in plant selection medium (U.S. Pat. No. 6,444,878) and a positive/negative system that utilizes D-amino acids (Erikson et al., Nat Biotechnol, 2004, 22, 455-8). European Patent Publication No. EP 0 530 129 A1 describes a positive selection system which enables the transformed plants to outgrow the non-transformed lines by expressing a transgene encoding an enzyme that activates an inactive compound added to the growth media. U.S. Pat. No. 5,767,378 describes the use of mannose or xylose for the positive selection of transgenic plants.

[0213] Methods for positive selection using sorbitol dehydrogenase to convert sorbitol to fructose for plant growth have also been described (WO 2010/102293). Screenable marker genes include the beta-glucuronidase gene (Jefferson et al., 1987, EMBO J. 6: 3901-3907; U.S. Pat. No. 5,268,463) and native or modified green fluorescent protein gene (Cubitt et al., 1995, Trends Biochem. Sci. 20: 448-455; Pan et al., 1996, Plant Physiol. 112: 893-900).

[0214] Transformation events can also be selected through visualization of fluorescent proteins such as the fluorescent proteins from the nonbioluminescent Anthozoa species which include DsRed, a red fluorescent protein from the Discosoma genus of coral (Matz et al. (1999), Nat Biotechnol 17: 969-73). An improved version of the DsRed protein has been developed (Bevis and Glick (2002), Nat Biotech 20: 83-87) for reducing aggregation of the protein.

[0215] Visual selection can also be performed with the yellow fluorescent proteins (YFP) including the variant with accelerated maturation of the signal (Nagai, T. et al. (2002), Nat Biotech 20: 87-90), the blue fluorescent protein, the cyan fluorescent protein, and the green fluorescent protein (Sheen et al. (1995), Plant J 8: 777-84; Davis and Vierstra (1998), Plant Molecular Biology 36: 521-528). A summary of fluorescent proteins can be found in Tzfira et al. (Tzfira et al. (2005), Plant Molecular Biology 57: 503-516) and Verkhusha and Lukyanov (Verkhusha, V. V. and K. A. Lukyanov (2004), Nat Biotech 22: 289-296) whose references are incorporated in entirety. Improved versions of many of the fluorescent proteins have been made for various applications. It will be apparent to those skilled in the art how to use the improved versions of these proteins or combinations of these proteins for selection of transformants.

[0216] The plants modified for enhanced performance by reducing the expression of the transcription factor genes or transcription factor gene combinations may be combined or stacked with input traits by crossing or plant breeding. Useful input traits include herbicide resistance and insect tolerance, for example a plant that is tolerant to the herbicide glyphosate and that produces the Bacillus thuringiensis (BT) toxin. Glyphosate is a herbicide that prevents the production of aromatic amino acids in plants by inhibiting the enzyme 5-enolpyruvylshikimate-3-phosphate synthase (EPSP synthase). The overexpression of EPSP synthase in a crop of interest allows the application of glyphosate as a weed killer without killing the modified plant (Suh, et al., J. M Plant Mol. Biol. 1993, 22, 195-205). BT toxin is a protein that is lethal to many insects providing the plant that produces it protection against pests (Barton, et al. Plant Physiol. 1987, 85, 1103-1109). Other useful herbicide tolerance traits include but are not limited to tolerance to Dicamba by expression of the dicamba monoxygenase gene (Behrens et al, 2007, Science, 316, 1185), tolerance to 2,4-D and 2,4-D choline by expression of a bacterial aad-1 gene that encodes for an aryloxyalkanoate dioxygenase enzyme (Wright et al., Proceedings of the National Academy of Sciences, 2010, 107, 20240), glufosinate tolerance by expression of the bialophos resistance gene (bar) or the pat gene encoding the enzyme phosphinotricin acetyl transferase (Droge et al., Planta, 1992, 187, 142), as well as genes encoding a modified 4-hydroxyphenylpyruvate dioxygenase (HPPD) that provides tolerance to the herbicides mesotrione, isoxaflutole, and tembotrione (Siehl et al., Plant Physiol, 2014, 166, 1162). The plants modified for enhanced yield by reducing the expression of the transcription factor genes or transcription factor gene combinations may be combined or stacked with other genes which improve plant performance.

[0217] Unless otherwise defined, all technical and scientific terms used herein have the same meaning as commonly understood by one of ordinary skill in the art to which this present invention pertains. Exemplary methods and materials are described below, although methods and materials similar or equivalent to those described herein can also be used in the practice of the present invention and will be apparent to those of skill in the art.

[0218] All patents, publications and other references mentioned herein are incorporated by reference in their entirety. In case of conflict, the present specification, including definitions, will control. The materials, methods, and examples are illustrative only and not intended to be limiting.

### EXAMPLES

### Example 1. Identification of Downregulated Transcription Factors in Switchgrass Lines Expressing Global Transcription Factors

[0219] Transgenic overexpression of global transcription factors STR1, STIF1, and BMY1 (US 2016/0194650; WO2014100289) was previously shown to increase yield in switchgrass. Although the use of the global transcription factors is useful for the production of biomass, for most crops it is more important to increase the yield of the harvested product which is seed. It is also important to be able to identify the downstream genes responsible for the overall impact of the global transcription factors to be able to develop plants with traits useful for the particular crop of interest without unwanted outcomes. These genetically engineered switchgrass lines are invaluable sources of new information for identifying other transcription factors genes whose altered expression or activity was important for this yield increase. Global gene expression profiling using an Affymetrix switchgrass cDNA GeneChip was performed as described below to determine the changes in gene expression in the high yielding lines for all of the 40,000 known genes in the switchgrass genome.

[0220] Global Gene Expression Analysis and Data Mining.

[0221] Three pooled RNA samples, each from three independent transgenic switchgrass plants confirmed to express STR1, STIF1 and BMY1, were used as biological replicates for the microarray gene expression analysis. After total RNA QC analysis, hybridization and scanning to the Affymetrix switchgrass GeneChip containing probes was performed to query approximately 43,344 transcripts (Zhang et al., 2013, Plant Journal 74: 160-173) using the manufacturer's instructions (http://www.affymetrix.com). Raw numeric values representing the signal of each feature were imported into AffylmGUI and the data were background corrected, normalized, and summarized using Robust Multiarray Averaging (RMA). A linear model was then used to average data between replicate arrays and to detect differential expression. The quality of gene data was assessed using box and scatter plots. The box plot was used to compare the intensity distributions of all samples. The distributions of log 2 ratios among the samples were similar. The scatter plot was used to assess gene expression variation between the replicates. Data from STR1, STIF1, and BMY1 lines were compared to wild-type lines and genes with significant probe sets (FDR<0.1) with ≥2.0-fold changes were considered as differentially expressed.

[0222] Identification and Functional Annotations of “Differentially Expressed Genes” Regulated by the TFs.

[0223] Since the whole genome sequence of switchgrass is not well annotated, reciprocal BLAST analysis (switchgrass-rice-maize-sorghum) was used to obtain the functional annotations and their corresponding orthologs for the differentially expressed genes. Reciprocal BLAST is a common computational method for predicting ‘putative orthologues’. The BLAST algorithm calculates percent sequence identity and performs a statistical analysis of the similarity between the two sequences. Typically, this uses a first BLAST that involves BLASTing a query sequence, for example a differentially expressed switchgrass transcript, against a database of gene sequences from an organism of interest, such as rice, maize, or sorghum. The database of gene sequences can be a publicly available database, such as the databases available at the National Center for Biotechnology Information (NCBI) or a completely sequenced genome. BLASTN or TBLASTX are generally used when starting from a nucleotide sequence, and BLASTP or TBLASTN when starting from a protein sequence. The BLAST results may optionally be filtered. The full-length sequences of either the filtered results or non-filtered results are then BLASTed back (second BLAST) against sequences from the organism from which the query sequence is derived, in our case switchgrass. The results of the first and second BLASTs are then compared. If this returns the switchgrass gene originally used as the highest scorer, then the two genes are considered putative orthologues.

[0224] Using the Plants TF database v 3.0, 77 genes that are predicted to be transcription factors with a DNA-binding domain were identified. These downstream transcription factors (dTFs) belonged to diverse family of transcription factors such as MYB, bZIP, ERF, bHLH, NAC, C2H2, G2-like, CO-like, WRKY, and HD-Zip. Interestingly, we found that the genes encoding proteins with MYB and bZIP class were the most enriched genes regulated in STR1 and BMY1, and several of these orthologous genes are predicted to be involved with agronomic traits such as biomass yield, grain yield, and abiotic stress tolerance in model and other crop plants.

[0225] For the purpose of this experiment we focused on the dTFs that are downregulated since they can be inactivated or their expression can be reduced alone or in combinations to increase crop performance using a range of methods well known in the art including genome editing. Genome editing has the advantage that it may enable the development of performance enhancing traits for major food crops with lower government regulatory hurdles. The individual dTFs that were downregulated by more than two-fold (Log 2 Fold ≤−1) by STR1, STFI, or BMY1 are shown in Table 1. 16 dTFs were downregulated by only one of the global transcription factors. Using the two-fold cut off (Log 2 ≤−1), eight dTFs were downregulated by two or more global regulatory genes selected from STR1, STIF1, and BMY1 (FIG. 1). Using the two-fold cut off only one gene, dTF22, was downregulated by all three global transcription factors STR1, STIF1, and BMY1. However there were several dTFs that were down regulated by all three global transcription factors STR1, STIF1, and BMY1 that didn't meet the 2 fold cutoff, including dTF3, dTF9, dTF10, dTF14, dTF17, dTF18, and dTF60.

TABLE 1
Candidate dTF genes that are down-regulated by one or more global transcription factors

| | | | | STR1 Log2 | STIF1 Log2 | BMY1 Log2 |
|---|---|---|---|---|---|---|
| | | | Gene | Fold Change | Fold Change | Fold Change |
| Gene | Switchgrass Gene ID¹ | Gene annotation | Family | (Down regulated)² | (Down regulated) | (Down regulated) |
| dTF1 | Pavirv00029177m | MYB family | MYB | −1.59 | 0.37 | −2.11 |
| | (Gene: SEQ ID NO: 1, | transcription | | (Down) | | (Down) |
| | Protein: SEQ ID NO: 289) | factor, putative, | | | | |
| | | expressed | | | | |
| dTF2 | Pavirv00003507m | homeodomain- | MYB | 0.12 | −1.09 | −1.83 |
| | (Gene: SEQ ID NO: 2, | related, putative, | | | (Down) | (Down) |
| | Protein: SEQ ID NO: 290) | expressed | | | | |
| dTF3 | AP13CTG12699_at | MYB family | MYB | −1.76 | −0.02 | −1.19 |
| | (Gene: SEQ ID NO: 3, | transcription | | (Down) | | (Down) |
| | Protein: SEQ ID NO: 291) | factor, putative, | | | | |
| | | expressed | | | | |
| dTF4 | Pavirv00024770m | bZIP | bZIP | −1.42 | 1.25 | 1.15 |
| | (Gene: SEQ ID NO: 4, | transcription | | (Down) | | |
| | Protein: SEQ ID NO: 292) | factor domain | | | | |
| | | containing | | | | |
| | | protein, expressed | | | | |
| dTF5 | Pavirv00012672m | MYB family | G2-like | 1.17 | −0.54 | −1.33 |
| | (Gene: SEQ ID NO: 5, | transcription | | | | (Down) |
| | Protein: SEQ ID NO: 293) | factor, putative, | | | | |
| | | expressed | | | | |
| dTF6 | Pavirv00006905m | CCT/B-box zinc | CO-like | −0.37 | 0.03 | −1.26 |
| | (Gene: SEQ ID NO: 6, | finger protein, | | | | (Down) |
| | Protein: SEQ ID NO: 294) | putative, | | | | |
| | | expressed | | | | |
| dTF7 | Pavirv000 11545m | bZIP | bZIP | −1.22 | 1.03 | −1.17 |
| | (Gene: SEQ ID NO: 7, | transcription | | (Down) | | (Down) |
| | Protein: SEQ ID NO: 295) | factor domain | | | | |
| | | containing | | | | |
| | | protein, expressed | | | | |
| dTF8 | Pavirv00039321m | dehydration- | ERF | 0.02 | −1.19 | −0.73 |
| | (Gene: SEQ ID NO: 8, | responsive | | | (Down) | |
| | Protein: SEQ ID NO: 296) | element-binding | | | | |
| | | protein, putative, | | | | |
| | | expressed | | | | |
| dTF9 | Pavirv00007251m | homeobox | HD-ZIP | −0.12 | −1.15 | −1.19 |
| | (Gene: SEQ ID NO: 9, | associated leucine | | | (Down) | (Down) |
| | Protein: SEQ ID NO: 297) | zipper, putative, | | | | |
| | | expressed | | | | |
| dTF10 | AP13ITG41879_s_at | HSF-type DNA- | HSF | −0.46 | −1.17 | −1.17 |
| | (Gene: SEQ ID NO: 10, | binding domain | | | (Down) | (Down) |
| | Protein: SEQ ID NO: 298) | containing | | | | |
| | | protein, expressed | | | | |
| dTF11 | Pavirv00007239m | bZIP | bZIP | −0.12 | 1.54 | −1.20 |
| | (Gene: SEQ ID NO: 11, | transcription | | | | (Down) |
| | Protein: SEQ ID NO: 299) | factor domain | | | | |
| | | containing | | | | |
| | | protein, expressed | | | | |
| dTF12 | Pavirv00003464m | Myb-like DNA- | G2-like | −0.44 | 0.07 | −1.15 |
| | (Gene: SEQ ID NO: 12, | binding domain | | | | (Down) |
| | Protein: SEQ ID NO: 300) | containing | | | | |
| | | protein, putative, | | | | |
| | | expressed | | | | |
| dTF13 | Pavirv00006072m | AP2 domain | ERF | 0.14 | 1.13 | −1.22 |
| | (Gene: SEQ ID NO: 13, | containing | | | | (Down) |
| | Protein: SEQ ID NO: 301) | protein, expressed | | | | |
| dTF14 | Pavirv00000078m | MYB family | MYB | −0.90 | −0.13 | −1.12 |
| | (Gene: SEQ ID NO: 14, | transcription | | | | (Down) |
| | Protein: SEQ ID NO: 302) | factor, putative, | | | | |
| | | expressed | | | | |
| dTF15 | Pavirv00012008m | ZOS3-24 - C2H2 | C2H2 | −0.64 | −1.11 | 0.05 |
| | (Gene: SEQ ID NO: 15, | zinc finger | | | (Down) | |
| | Protein: SEQ ID NO: 303) | protein, expressed | | | | |
| dTF16 | AP13CTG14279ST_s_at | NIN, putative, | Nin-like | −0.86 | 0.27 | −1.06 |
| | (Gene: SEQ ID NO: 16, | expressed | | | | (Down) |
| | Protein: SEQ ID NO: 304) | | | | | |
| dTF17 | Pavirv00053825m | heat stress | HSF | −0.13 | −1.04 | −0.89 |
| | (Gene: SEQ ID NO: 17, | transcription | | | (Down) | |
| | Protein: SEQ ID NO: 305) | factor, putative, | | | | |
| | | expressed | | | | |
| dTF18 | Pavirv00008285m | CCT/B-box zinc | CO-like | −0.55 | −1.00 | −1.03 |
| | (Gene: SEQ ID NO: 18, | finger protein, | | | (Down) | (Down) |
| | Protein: SEQ ID NO: 306) | putative, | | | | |
| | | expressed | | | | |
| dTF19 | Pavirv00010659m | OsMADS56 - | MIKC | −1.02 | 1.39 | 0.51 |
| | (Gene: SEQ ID NO: 19, | MADS-box | | (Down) | | |
| | Protein: SEQ ID NO: 307) | family gene with | | | | |
| | | MIKCc type-box, | | | | |
| | | expressed | | | | |
| dTF20 | Pavirv00067953m | auxin response | ARF | −1.00 | 0.04 | 0.58 |
| | (Gene: SEQ ID NO: 20, | factor 14, | | (Down) | | |
| | Protein: SEQ ID NO: 308) | putative, | | | | |
| | | expressed | | | | |
| dTF21 | Pavirv00005696m | basic helix-loop- | bHLH | 0.15 | 1.05 | −1.21 |
| | (Gene: SEQ ID NO: 21, | helix family | | | | (Down) |
| | Protein: SEQ ID NO: 309) | protein, putative, | | | | |
| | | expressed | | | | |
| dTF22 | Pavirv00012971m | DUF260 domain | LBD | −1.19 | −1.39 | −1.09 |
| | (Gene: SEQ ID NO: 22, | containing | | (Down) | (Down) | (Down) |
| | Protein: SEQ ID NO: 310) | protein, putative, | | | | |
| | | expressed | | | | |
| dTF59 | Pavirv00056268m | transcription | bHLH | 0.27 | 0.26 | −1.19 |
| | (Gene: SEQ ID NO: 23, | factor BIM2, | | | | (Down) |
| | Protein: SEQ ID NO: 311) | putative, | | | | |
| | | expressed | | | | |
| dTF60 | Pavirv00036358m | AP2 domain | ERF | −0.88 | −0.51 | −1.19 |
| | (Gene: SEQ ID NO: 24, | containing | | | | (Down) |
| | Protein: SEQ ID NO: 312) | protein, expressed | | | | |

¹Switchgrass gene IDs were assigned based on Phytozome v.10.1.
²Label of down regulation is only entered where the log2 fold change in expression is ≤−1.

### Example 2. Functional Characterization of dTF22 by Overexpression of its Coding Sequence in Switchgrass

[0226] To validate the functional phenotype of dTF22, a binary vector, pMBX1032 (FIG. 2, SEQ ID NO: 25), was produced that expressed dTF22 from the maize chlorophyll a/b-binding protein promoter (Sullivan et al., 1989, Mol. Gen. Genet. 215, 431-440). This promoter is equivalent to the cab-m5 promoter described in later work (Becker et al., 1992, Plant Mol. Biol. 20, 49-60). The cab-m5 promoter is fused to the hsp70 intron (Brown and Santino, 1997, U.S. patent Ser. No. 05/593,874) for enhanced expression in monocots. The dTF22 gene used in the expression construct was amplified from genomic DNA from switchgrass genotype YTEN(II56) and contains the native intron. Alignment of the amino acid sequence of the gene isolated from YTEN(II56) to the switchgrass sequence in Phytozome showed differences in five amino acids, likely due to genotype used for isolation of the gene (FIG. 3). Immature inflorescence-derived cultures of switchgrass that were produced according to Somleva and Ali (US Patent Application 2010/0229256) were used for Agrobacterium-mediated transformation [Somleva M. N. (2006) Switchgrass (Panicum virgatum L.). In: Wang K. (eds) Agrobacterium Protocols Volume 2. Methods in Molecular Biology, vol 344. Humana Press] using the vector encoded bar gene to screen plants that were resistant to the herbicide bialophos. Primary transformants were grown under greenhouse conditions to validate the functional phenotypes. In total, 266 primary transformants representing 34 independent transformation events were obtained. Forty-one plants (14 lines, 2-3 plants/line) and 4 wild-type control plants were grown in soil for 4 months.

[0227] The effects of the overexpression of dTF22 on plant growth and development was evaluated by monitoring plant phenotypes in tissue culture and soil. Biomass measurements (total biomass, leaf biomass, stem biomass, and number of tillers) were obtained after growth in the greenhouse for 4 months. All vegetative and reproductive tillers at different developmental stages from each plant were counted and cut below the basal node. Leaves and stem tissues were separated, cut into smaller pieces, air-dried at 27° C. for 12-14 days and dry weight measurements were obtained. The total biomass yield of the dTF22 overexpressing lines was reduced by 20-76% compared to the wild type control (FIG. 4). No formation of reproductive tillers was detected in 12 plants representing 7 independent transformation events. A lack of normal stem formation and/or elongation was also observed in 11 out of 12 lines analyzed. FIG. 5 shows a picture of plant line 17, which was severely stunted compared to a wild-type control plant.

[0228] The dTF22 gene was found to belong to DUF, or Domain of Unknown Function, which are uncharacterized protein families that do not include any protein with known functions. Our in silico analysis of functional association networks (STRING database; https://string-db.org) showed that DUF genes are co-expressed with various abiotic stress and phytohormone related genes and pathways. The fact that overexpression of dTF22 in switchgrass yielded plants with retarded growth and delayed flowering, indicates that it is a powerful negative regulator for vegetative and reproductive development, possibly by down regulating the ABA-responsive genes, and thus is a good target for genome editing to reduce or eliminate the expression of the gene.

### Example 3. Identification of Orthologs of dTF22 in Rice and Modification or Inactivation of dTF22 Expression Using CRISPR/Cas9 Genome Editing

[0229] The switchgrass gene was used to identify the rice ortholog of dTF22 as follows. The switchgrass amino acid sequence of dTF22 (SEQ ID NO: 310) was used as a query against the rice proteome using the BLASTP search (http://rice.plantbiology.msu.edu/analyses_search_blast.shtml). The hits were ranked in order of the alignment score and the top hit, LOC_Os03g41330 (Gene: SEQ ID NO: 210, Protein: SEQ ID NO: 465), was identified as the best ortholog. It will be apparent to those skilled in the art to target the additional orthologs of SEQ ID NO: 210 for reduced expression and this is included in the scope of this invention.

[0230] For CRISPR/Cas9 genome editing of the rice dTF22, seven sgRNA sequences were designed to target various regions of the promoter and or coding sequence of the gene to either reduce expression or to inactivate the rice dTF22 gene. SEQ ID NO: 27 was used for this purpose and includes the 5′ UTR region upstream of the ATG (predicted by Phytozome and/or transcript analysis), 1000 bp of promoter sequence upstream of the 5′ UTR, and the coding sequence of the rice dTF22 gene including any introns. Guide target sequences for these sgRNAs were designed following the SpCas9 guide RNA architectures (20 nucleotides followed by a PAM sequence of NGG) using a web-based guide RNA design tool, CRISPOR, on the TEFOR website. A number of other web-based tools can also be used for guide target sequence selection and analysis, such as CRISPRdirect and CRISPR-P 2.0 (Ding et al., 2016, Frontiers in Plant Science, 7, 703; Naito et al., 2015, Bioinformatics, 31, 1120; Liu et al., 2017, Molecular Plant, 10, 530).

[0231] Guide target sequences 1, 2, and 3 in Table 2 target the promoter and 5′UTR region to modify expression of the dTF22 gene according to the strategies outlined in FIGS. 6 and 7. Guide target sequences 4 and 5 (Table 2, FIG. 7) as well as Guide target sequences 6 and 7 (Table 3, FIG. 7) target the coding region of the dTF22 gene. The gRNAs can be used individually to create INDELS in the promoter region. For example binary vector pYTEN-24 (FIG. 8, SEQ ID NO: 26) contains an expression cassette for Guide target sequence #4 to create an INDEL in the dTF22 gene CDS. In this vector, Guide target sequence #4 and its associated scaffold are expressed from the rice U6 promoter. The vector also contains the Cas9 enzyme codon optimized for rice expressed from the 2×355 promoter, and the hpt1 gene (containing a CAT-1 intron) for selection of transformants with hygromycin expressed from the CaMV35S promoter fused to an hsp70 intron.

[0232] Binary vector pMBXS1223 (FIG. 9, SEQ ID NO: 543) contains expression cassettes for Guide target sequences 6 and 7 (Table 3) targeting two regions in the coding region of the dTF22 gene. The 2.504 kb rice dTF22 gene contains a large 1.804 kb intron. Guide target sequence #7 targets a site upstream of this intron while Guide target sequence #6 targets a site downstream of the intron (FIG. 7C). In vector pMBXS1223, both Guide target sequence #6 and #7, as well as their associated scaffolds, are expressed from the rice U6 promoter. The vector also contains the Cas9 enzyme codon optimized for rice expressed from the 2×35S promoter, and the hpt1 gene (containing a CAT-1 intron) for selection of transformants with hygromycin expressed from the CaMV35S promoter fused to an hsp70 intron.

TABLE 2
Guide target sequences for Cas9 mediated double
stranded cleavage of dTF22 in rice

| | | | Guide target #1 | | | Guide target #2 | | | Guide target #3 | | |
|---|---|---|---|---|---|---|---|---|---|---|---|
| | | | | Guide | | | | | | Guide | |
| | | | | target | | | Guide | | | target | |
| | | Sequence | | sequence | | | target | | | sequence | |
| | Rice | size¹, | | (5′ to | | | sequence | | | (5′ to | |
| Gene | ortholog | bp | Strand² | 3′) | PAM³ | Strand | (5′ to 3′) | PAM | Strand | 3′) | PAM |
| dTF22 | LOC_Os03g41330 | 3839 | + | TAGCTAG | GGG | + | TAAGAC | TGG | − | AACTCTC | TGG |
| | | (SEQ ID | | GTAGCTG | | | GGACAG | | | TATTAAG | |
| | | NO: 27) | | GGTATT | | | TTAAACAT | | | GGAATT | |
| | | | | (SEQ ID | | | (SEQ ID | | | (SEQ ID | |
| | | | | NO: 548) | | | NO: 549) | | | NO: 550) | |

| | | | Guide target #4 | | | Guide target #5 | | |
|---|---|---|---|---|---|---|---|---|
| | | | | Guide | | | Guide | |
| | | | | target | | | target | |
| | | Sequence | | sequence | | | sequence | |
| | Rice | size¹, | | (5′ to | | | (5′ to | |
| Gene | ortholog | bp | Strand | 3′) | PAM | Strand | 3′) | PAM |
| dTF22 | LOC_Os03g41330 | 3839 | − | CCGTCGA | CGG | + | ACGTGCG | CGG |
| | | (SEQ ID | | TCCACTC | | | AGGAAGC | |
| | | NO: 27) | | GATGCT | | | CAGCGA | |
| | | | | (SEQ ID | | | (SEQ ID | |
| | | | | NO: 551) | | | NO: 552) | |

¹Sequence includes the 5′ UTR region upstream of the ATG (predicted by Phytozome and/or transcript analysis), 1000 bp of promoter sequence upstream of the 5′ UTR, and the coding sequence of the gene including any introns.
²Strand (+/−) refers to the gRNA binding to either the forward strand of DNA (+) or its reverse complement (−).
³PAM refers to the protospacer adjacent motif for the CAS9 enzyme that resides directly adjacent to the 3′ end of the guide RNA target.

TABLE 3
Guide target sequences for Cas9 mediated double stranded
cleavage of dTF22 in rice

| | | | Guide target #6 | | | Guide target #7 | | |
|---|---|---|---|---|---|---|---|---|
| | | | | Guide | | | Guide | |
| | | Sequence | | target | | | target | |
| | Rice | size¹, | | sequence | | | sequence | |
| Gene | ortholog | bp | Strand² | (5′ to 3′) | PAM | Strand | (5′ to 3′) | PAM |
| dTF22 | LOC_Os03g41330 | 3839 | + | GCGGCG | TGG | + | TGCTGCG | TGG |
| | | (SEQ ID | | CCATCGG | | | GCCGAG | |
| | | NO: 27) | | GCTCATG | | | CATCGAG | |
| | | | | (SEQ ID | | | (SEQ ID | |
| | | | | NO: 553) | | | NO: 554) | |

¹Sequence includes the 5′ UTR region upstream of the ATG (predicted by Phytozome and/or transcript analysis), 1000 bp of promoter sequence upstream of the 5′ UTR, and the coding sequence of the gene including any introns.
²Strand (+/−) refers to the gRNA binding to either the forward strand of DNA (+) or its reverse complement (−).
³PAM refers to the protospacer adjacent motif for the CAS9 enzyme that resides directly adjacent to the 3′ end of the guide RNA target.

[0233] CRISPR Cas9 can be performed multiple ways: by introducing a complex of the Cas9 enzyme and the gRNAs (called ribonucleoprotein complexes, or RNPs) directly to protoplasts (Woo et al., 2015, 33, 1162-1164); by transfection of protoplasts either stably or transiently with a genetic construct(s) containing expression cassettes for the gRNA(s) and the Cas9 enzyme; through particle bombardment of the plant or plant tissues with a genetic construct(s) with expression cassettes for the gRNA(s) and the Cas9 enzyme; or through Agrobacterium-mediated transformation of the plant or plant tissues using a binary construct(s) with expression cassettes for the gRNA(s) and the Cas9 enzyme. An advantage of RNPs, as well as the transient expression of the expression cassettes encoding the Cas9 enzyme and the gRNAs, in protoplasts is that DNA does not stably integrate into the genome and thus does not need to be removed through segregation to produce a plant containing only the edit. For stable transformation methods, segregation of the unwanted DNA encoding the CRISPR editing machinery must be removed after the edit is obtained by conventional breeding methods.

[0234] Several methods can be used to transform rice including transformation of protoplasts (Hayashimoto, A., Z. Li, and N. Murai, A Polyethylene Glycol-Mediated Protoplast Transformation System for Production of Fertile Transgenic Rice Plants. Plant Physiology, 1990. 93(3): p. 857-863) and Agrobacterium-mediated transformation. Agrobacterium-mediated transformation of the CRISPR/Cas9 machinery for editing targeting dTF22 is described below as an example, however those skilled in the art will understand that transient or stable transformation of protoplasts, or use of RNPs with protoplasts, followed by production of callus and regeneration of plants can also be used to generate edited plants.

[0235] To initiate CRISPR/Cas9 genome editing of dTF22, binary vector pYTEN-24 is transformed into rice as follows. In preparation for rice transformation, callus of the rice cultivar Nipponbare is initiated from mature, dehusked, surface sterilized seeds on N6-basal salt callus induction media (N6-CI; contains per liter 3.9 g CHU (N₆) basal salt mix [Sigma Catalog # C1416]; 10 ml of 100× N6-vitamins [contains in final volume of 500 mL, 100 mg glycine, 25 mg nicotinic acid, 25 mg pyridoxine hydrochloride and 50 mg thiamin hydrochloride]; 0.1 g myo-inositol; 0.3 g casamino acid (casein hydrolysate); 2.88 g proline; 10 ml of 100× 2,4-dichlorophenoxyacetic acid (2,4-D), 30 g sucrose, pH 5.8 with 4 g gelrite or phytagel). Approximately 100 seeds are used for each transformation. The frequency of callus induction is scored after 21 days of culture in the dark at 27±1° C. Callus induction from the scutellum with a high frequency (of about 96% total callus induction) is observed.

[0236] Rice transformation vector pYTEN-24 is transformed into Agrobacterium strain AGL1. The resulting Agrobacterium strain containing the vector is resuspended in 10 mL of MG/L medium (5 g tryptone, 2.4 g yeast extract, 5 g mannitol, 5 g Mg₂SO₄, 0.25 g K₂HPO₄, 1 g glutamic acid and 1 g NaCl) to a final OD600 of 0.3. Approximately twenty-one day old scutellar embryogenic callus are cut to about 2-3 mm in size and are infected with Agrobacterium containing pYTEN-24 for 5 min. After infection, the calli are blotted dry on sterile filter papers and transferred onto co-cultivation media (N6-CC; contains per liter 3.9 g CHU (N₆) basal salt mix; 10 ml of 100× N6-vitamins; 0.1 g myo-inositol; 0.3 g casamino acid; 10 ml of 100× 2,4-D, 30 g sucrose, 10 g glucose, pH 5.2 with 4 g gelrite or phytagel and 1 mL of acetosyringone [19.6 mg/mL stock]). Co-cultivated calli are incubated in the dark for 3 days at 25° C. After three days of co-cultivation, the calli are washed thoroughly in sterile distilled water to remove the bacteria. A final wash with a timentin solution (250 mg/L) is performed and calli are blotted dry on sterile filter paper. Callus are transferred to selection media [N6-SH; contains per liter 3.9 g CHU (N₆) basal salt mix, 10 ml of 100× N6-vitamins, 0.1 g myo-inositol, 0.3 g casamino acid, 2.88 g proline, 10 ml of 100× 2,4-D, 30 g sucrose, pH 5.8 with 4 g phytagel and 500 μL of hygromycin (stock concentration: 100 mg/ml)] and incubated in the dark for two-weeks at 27±1° C. The transformed calli that survive the selection pressure and that proliferate on N6-SH medium are sub-cultured on the same media for a second round of selection. These calli are maintained under the same growth conditions for another two-weeks. The number of plants regenerated after 30 days on N6-SH medium is scored and the frequency calculated. After 30 days, the proliferating calli are transferred to regeneration media (N6-RH medium; contains per liter 4.6 g MS salt mixture, 10 ml of 100× MS-vitamins [MS-vitamins contains in 500 mL final volume 250 mg nicotinic acid, 500 mg pyridoxine hydrochloride, 500 mg thiamine hydrochloride, 100 mg glycine], 0.1 g myo-inositol, 2 g casein hydrolysate, 1 ml of 1,000×1-naphtylacetic acid solution [NAA; contains in 200 mL final volume 40 mg NAA and 3 mL of 0.1 N NaOH], 20 ml of 50× kinetin [contains in 500 mL final volume 50 mg kinetin and 20 mL 0.1 N HCl], 30 g sucrose, 30 g sorbitol, pH 5.8 with 4 g phytagel and 500 μl of a 100 mg/mL hygromycin stock). The regeneration of plantlets from these calli occurs after about 4-6 weeks. Rooted plants are transferred into peat-pellets for one week to allow for hardening of the roots. The plants are then kept in zip-loc bags for acclimatization. Plants (T0 generation) are transferred into pots and grown in a greenhouse.

[0237] The T0 plants are examined for edits as follows: During growth, leaf material from the T0 transformants is harvested and DNA is extracted from the plant tissue using a Qiagen Plant DNeasy kit. PCR reactions are performed using primers that bind to regions of genomic DNA about 100 base pairs away from the gRNA binding site. Sequencing analysis is performed on the crude PCR mixture using a Next-Generation sequencing technology and automated sequencing assembly offered by a vendor. Plants with INDELS are identified and allowed to grow in a greenhouse to maturity prior to seed harvest (T1 generation).

[0238] T1 seeds are planted and grown in a greenhouse, leaf tissue is harvested, and genomic DNA is isolated. Lines are screened for the presence of the hpt1 gene or the Cas9 gene by PCR. Plants that no longer have these genes may have lost the DNA encoding the Cas9 machinery but may still retain the edit. Screening can also be done by co-expressing a visual marker such as DsRed, a red fluorescent protein from the Discoma genus of coral (Matz et al., 1999, Nat. Biotechnol. 17, 969-973), by placing an expression cassette coding the gene on vector pYTEN-24 to allow visual detection of seeds that no longer carry the vector encoded transgenes. Ti transgene free plants are thus further screened for edits by extracting genomic DNA from leaf tissue and performing PCR reactions using primers that bind to regions of genomic DNA about 100 base pairs away from the gRNA binding site. Sequencing analysis is performed on the crude PCR mixture using a Next-Generation sequencing technology and automated sequencing assembly offered by a vendor. Plants with INDELS are identified. The sequence of the edits is analyzed and edits that insert 1 base or that delete 1, 2, 4, 5, 7, 8 or more bases are selected. These INDELS will create a reading frame shift likely creating a truncated protein. Lines with the best INDELS are allowed to grow in a greenhouse to maturity prior to seed harvest (T2 generation). The expression levels of dTF22 in various tissues of rice is determined. Transcript levels of leaves, stem tissues, panicles and seeds at different developmental stages are determined by RT-PCR using a gene such as β-actin as a reference. Total RNA is isolated from the different rice tissues using the RNeasy Plant Mini Kit (Qiagen, Valencia, Calif., USA) according to the manufacturer's protocol. DNase treatment and column purification are performed and RNA quality is assessed using an Agilent 2100 Bioanalyzer (Agilent Technologies, Santa Clara, Calif., USA) according to the manufacturer's instructions. The RT-PCR analysis is performed with 50 ng of total RNA using a One Step RT-PCR Kit (Qiagen, Valencia, Calif., USA). Lines with reduced expression of dTF22 are evaluated.

[0239] If required, lines can be grown another generation to obtain homogenous edits.

[0240] Rice lines are evaluated for their total grain yield and other agronomic parameters such as drought tolerance, stress tolerance, stem thickness, number of tillers, size of panicle and 100 seed weight of the rice grains can also be analyzed. High yielding lines or lines with good agronomic parameters indicating improved performance as compared the control plants where the expression of dTF22 has not been reduced are advanced.

[0241] INDELS can be made in just the promoter region to reduce expression of dTF22 by modifying vector pYTEN-24 to contain either Guide target sequences #1, 2, or 3 (Table 2, FIG. 7C). Transformation of rice and screening for edits is performed as previously described and rice lines can be screened for reduced expression of dTF22 and/or increased yield.

[0242] Alternatively, two of the gRNAs can be co-expressed, as described in FIG. 7B, to excise a larger piece of DNA from the coding sequence of dTF22, it's promoter region, or both. To excise DNA from the CDS, guide target sequences can be selected from numbers 4, 5, 6, and 7 (Tables 2 and 3). To excise the majority of the promoter and the CDS, Guide target sequences 3 and 5 can be used. To excise DNA only within the promoter region, guide target sequences can be selected from 1, 2, and 3.

[0243] To generate edits in dTF22 with Guide target sequences #6 and #7, callus of the rice cultivar Nipponbare was transformed with vector pMBXS1223 (FIG. 9) using Agrobacterium strain AGL1 as described above. A total of 34 putative rice T0 transgenic plants from five different transformed callus lines were obtained. Transgenic lines were screened by PCR for the presence of the Cas9 gene and two of the 34 putative rice T0 transgenic plants did not contain Cas9 and were discarded. Genomic DNA was isolated from plants during the early vegetative growth stage (approximately 3-4 weeks after transfer to soil) using the Qiagen Plant DNeasy extraction kit. Tissue was sampled from young leaves and flash frozen with liquid nitrogen prior to DNA extraction. Edits were characterized by amplicon sequencing using an outside vendor. Two of the plants had ambiguous sequencing results and were discarded. The remaining 30 plants are shown in Table 4. For Guide target sequence 7, five different types of edits were observed (FIG. 10A) and some lines contained more than one edit. A summary of sequencing results for the individual plants observed for Guide target sequence #7 is listed in Table 4. All mutations result in a change in reading frame for the protein which result in truncated proteins of varying length depending on the mutant. Plants with Variant 2 are the most desired of the variants obtained since Variant 2 produces a short truncated protein of only 23 amino acids.

[0244] Only a few lines were analyzed for edits with Guide target sequence #6. For these lines, 4 different types of edits were observed (FIG. 10B). A summary of sequencing results for the individual plants observed for Guide target sequence #6 is listed in Table 4.

TABLE 4
Rice plants with confirmed edits

| | |
|---|---|
| Guide target #7 | Guide target #6 |

| | | % of | | % of |
|---|---|---|---|---|
| Plant | Variant | variant | Variant | variant |
| ID | number¹ | reads² | number³ | reads² |
| 16 | 1 | 97.08% | N.A. | N.A. |
| 10a | 2 | 98.89% | 3 | 46.26 |
| | | | 4 | 43.61 |
| 10b | 2 | 99.12% | N.A. | N.A. |
| 10c | 2 | 99.33% | N.A. | N.A. |
| 10d | 2 | 98.24% | 3 | 46.25 |
| | | | 4 | 44.79 |
| 10e | 2 | 98.93% | N.A. | N.A. |
| 10f | 2 | 100% | 3 | 39.32 |
| | | | 4 | 37.24 |
| 10g | 2 | 100% | N.A. | N.A. |
| 17b | 2 | 49.34% | N.A. | N.A. |
| 17b | 4 | 47.34% | | |
| 32a | 2 | 95.25% | N.A. | N.A. |
| 32c | 3 | 49.36% | N.A. | N.A. |
| | 4 | 48.43% | | |
| 32d | 3 | 48.07% | N.A. | N.A. |
| | 4 | 47.60% | | |
| 32e | 3 | 49.43% | N.A. | N.A. |
| | 4 | 48.18% | | |
| 32f | 2 | 41.75% | N.A. | N.A. |
| | 5 | 47.33% | | |
| 32g | 3 | 49.94% | N.A. | N.A. |
| | 4 | 48.38% | | |
| 32h | 3 | 47.06% | N.A. | N.A. |
| | 4 | 45.74% | | |
| 32j | 2 | 49% | N.A. | N.A. |
| | 5 | 50.35% | | |
| 321 | 2 | 95.30% | N.A. | N.A. |
| 32n | 2 | 96.06% | N.A. | N.A. |
| 32o | 2 | 96.17% | N.A. | N.A. |
| 32p | 1 | 50.13% | N.A. | N.A. |
| | 4 | 48.83% | | |
| 32q | 1 | 51.70% | N.A. | N.A. |
| | 4 | 47.89% | | |
| 4i | 1 | 99.48% | 1 | 46.47 |
| | | | 2 | 45.94 |
| 4j | 1 | 98.76% | N.A. | N.A. |
| 4k | 1 | 99.38% | 1 | 48.05 |
| | | | 2 | 47.56 |
| 4m | 1 | 97.95% | N.A. | N.A. |
| 4n | 1 | 98.34% | 1 | 45.54 |
| | | | 2 | 47.28 |
| 4o | 1 | 96.36% | 1 | 46.58 |
| | | | 2 | 47.88 |
| 4p11 | 1 | 98.46% | 1 | 44.49 |
| | | | 2 | 46.04 |
| 4p12 | 1 | 99.09% | 1 | 47.66 |
| | | | 2 | 48.43 |
| WT-7 | wt | 98.81% | | |
| control | | | | |
| WT-8 | wt | 99.03% | | |
| control | | | | |

WT-7 and WT-8 are wild-type control plants. N.A., sample not analyzed.
¹Variant number refers to the sequence of the edit for Guide target #7 described in FIG. 10A.
²Percent of reads in amplicon sequencing data that contain the sequence of the indicated variant.
³Variant number refers to the sequence of the edit for Guide target #6 described in FIG. 10B.

[0245] T0 plants with edits were grown to produce seed and T1 seed was harvested. The presence of an expression cassette with the DsRed protein on vector pMBXS1223 allows seeds to be screened for the presence of vector DNA. A portion of the T1 seeds will be expected to retain the edit but lose the vector DNA encoding the CRISPR/Cas9 editing machinery via segregation. DsRed negative seeds from line 10f (Table 4) were dehusked, sterilized, and placed in sterile petri dishes with filter paper and 3 mL of sterile water. Seeds were germinated in the growth chamber at 28° C. with a 16 h light and 8 h dark cycle. Improved germination of the edited line 10f was observed. Germination was monitored at 2 days and 6 days. Of 64 total seeds analyzed from edited line 10f, 28 germinated within two days (44% germination). Out of 59 wild-type seed, 5 germinated (8% germination) within two days. After six days, 58 of 64 seeds from edited line 10f had germinated and had shoots (91%). After six days, 13 of 59 wild-type control seeds had germinated and had shoots (22%). Germinated seeds with shoots were transferred to peat pellets. Plants are transferred to soil. The edits in the T1 leaf tissue are characterized by amplicon sequencing.

[0246] Genome editing of rice homologs to the rice dTF22 gene

[0247] In addition to editing of the rice dTF22 gene (LOC_Os03g41330, SEQ ID NO: 27) as described above, two other rice dTF22 homologous genes, LOC_Os03g33090 (SEQ ID NO: 544) and LOC_Os03g45750 (SEQ ID NO: 545) were selected for editing based on their in-silico expression profiles. Guide target sequences can be designed to edit LOC_Os03g33090 and LOC_Os03g45750. Editing of one or more genes selected from the group of LOC_Os03g41330 (SEQ ID NO: 27), LOC_Os03g33090 (SEQ ID NO: 544), and LOC_Os03g45750 (SEQ ID NO: 545) can be performed as described above.

TABLE 5
Rice dTF22 homologous genes

| Gene | Gene ID | Sequence size¹ in base pairs |
|---|---|---|
| Rice ortholog to switchgrass dTF22 | LOC_Os03g41330 | 3839 |
| (Protein: SEQ ID: 465) | | (SEQ ID NO: 27) |
| Rice gene homologous to | LOC_Os03g33090 | 1866 |
| LOC_Os03g41330 | | (SEQ ID NO: 544) |
| (Protein: SEQ ID: 546) | | |
| Rice gene homologous to | LOC_Os03g45750 | 3252 |
| LOC_Os03g41330 | | (SEQ ID NO: 545) |
| (Protein: SEQ ID: 547) | | |

¹Sequence includes the 5' UTR region upstream of the ATG (predicted by Phytozome and/or transcript analysis), 1000 bp of promoter sequence upstream of the 5' UTR, and the coding sequence of the gene including any introns.

### Example 4. Identification of Orthologs of dTF22 in Other Crops and Design of gRNAs for CRISPR/Cas9 Genome Editing

[0248] Orthologs of the switchgrass dTF22 gene were found by reciprocal BLAST searches against all the proteins encoded by the genes annotated in the genome of interest. A reciprocal blast hit is found when the proteins encoded by two genes, each in a different genome, find each other as the best scoring match. The National Center for Biotechnology Information database, The Phytozome database from the Joint Genome Institute, The Michigan State University Rice Genome Annotation Project database, and The Plant Transcription Factor Database were used for the BLAST searches and to extract the orthologous gene sequences and gene ID's.

[0249] Guide target sequences to edit the promoter region of dTF22 in various crops, using the strategy described in FIG. 7A-B, are shown in Table 6. These guide target sequences can be used to form single gRNAs to make INDELS in the promoter regions and lines can be screened for reduced expression of dTF22. Alternatively, Guide target sequences #1 and #3 can be co-expressed to delete the majority of the promoter and 5′ UTR to inactivate the promoter. Guide target sequences to edit the coding sequence as described in FIG. 7A-B are shown in Table 7 for maize, Medicago truncatula, and wheat. The genome sequence for alfalfa (Medicago sativa) is not publically available. The sequence of a close relative to alfalfa, Medicago truncatula was used to find the dTF22 ortholog. Once the genome sequence of alfalfa (Medicago sativa) is publically available, the dTF22 ortholog can be found by comparison with the Medicago truncatula and switchgrass genes. Two guide target sequences can be selected from Tables 6 and 7 to produce a sgRNA, using the procedures described in FIG. 6, and co-expressed to delete a region of the promoter and/or CDS as described in FIG. 7B.

TABLE 6
Orthologs of dTF22 in major crops and gRNAs to edit the promoter region.

| | | | Guide target #1 | | | Guide target #2 | | | Guide target #3 | | |
|---|---|---|---|---|---|---|---|---|---|---|---|
| | | | | Guide | | | Guide | | | Guide | |
| | | Sequence | | target | | | target | | | target | |
| | | size¹, | | sequence | | | sequence | | | sequence | |
| Crop | dTF22 ortholog | bp | Strand² | (5′ to 3′) | PMA³ | Strand | (5′ to 3′) | PMA | Strand | (5′ to 3′) | PMA |
| Maize | GRMZM2G017319 | 3237 | + | CATTAAACGT | AGG | + | TACGATGCAGA | GGG | − | GCTCCCGGGT | CGG |
| | (Protein: SEQ ID | (SEQ ID | | ACGAGACTGC | | | GGTGAGCTG | | | TTAATTTTCC | |
| | NO: 334) | NO: 28) | | (SEQ ID NO: | | | (SEQ ID NO: | | | (SEQ ID NO: | |
| | | | | 555) | | | 556) | | | 557) | |
| soybean | Glyma05g22120 | 1272 | + | AAGACACACT | GGG | − | CTTCTGTATTA | TGG | + | CTCTCTTTTCT | TGG |
| | (Protein: SEQ ID | (SEQ ID | | CACACACCCT | | | TTGTAAGTA | | | CTCTCATAG | |
| | NO: 417) | NO: 29) | | (SEQ ID NO: | | | (SEQ ID NO: | | | (SEQ ID NO: | |
| | | | | 558) | | | 559) | | | 560) | |
| Brassica | BnaC02g16720D | 1145 | + | AACAACTGGA | CGG | + | ACTACCCTCTC | GGG | − | TCCGATTGGG | TGG |
| napus | (Protein: SEQ ID | (SEQ ID | | CAGACTCTGT | | | TCTCTCAAA | | | ATTCTACCGT | |
| | NO: 441) | NO: 30) | | (SEQ ID NO: | | | (SEQ ID NO: | | | (SEQ ID NO: | |
| | | | | 561) | | | 562) | | | 563) | |
| Camelina | Csa18g040020 | 1156 | + | TCTTCATTCTC | AGG | − | AATAAAGAGA | GGG | + | TCTTTTTACC | AGG |
| sativa | (Protein: SEQ ID | (SEQ ID | | CAGACCCTC | | | CATAGGGTAC | | | ACTCTCTCTA | |
| | NO: 542) | NO: 31) | | (SEQ ID NO: | | | (SEQ ID NO: | | | (SEQ ID NO: | |
| | | | | 564) | | | 565) | | | 566) | |
| Sorghum | Sb01g014800 | 1357 | + | CAGCTTATAT | AGG | + | TTACCTGCGTA | GGG | − | TTTCTATTCAT | TGG |
| bicolor | (Protein: SEQ ID | (SEQ ID | | ATATCGAGAC | | | GAGGATCCT | | | TGTAGCTAG | |
| | NO: 513) | NO: 32) | | (SEQ ID NO: | | | (SEQ ID NO: | | | (SEQ ID NO: | |
| | | | | 567) | | | 568) | | | 569) | |
| Medicago | Medtr1g106420 | 1776 | − | TGTATGGTCT | AGG | − | CTCAGGTTCTC | TGG | − | AGTAAATAAG | TGG |
| truncatula | (Protein: SEQ ID | (SEQ ID | | TATATCTTGC | | | CGCAAATGT | | | CATTGGTTGT | |
| | NO: 489) | NO: 33) | | (SEQ ID NO: | | | (SEQ ID NO: | | | (SEQ ID NO: | |
| | | | | 570) | | | 571) | | | 572) | |
| wheat | Traes_4AL_7241716B6 | 3051 | − | TGGACAGTCG | CGG | + | CCTCCCCCCGA | AGG | + | GTATAACTTT | AGG |
| | (Protein: SEQ ID | (SEQ ID | | ATCACCGTAT | | | TTTCAATGG | | | AGCCAGATGG | |
| | NO: 537) | NO: 34) | | (SEQ ID NO: | | | (SEQ ID NO: | | | (SEQ ID NO: | |
| | | | | 573) | | | 574) | | | 575) | |

^{¹}For maize, Medicago truncatula, and wheat, the sequence size and SEQ ID includes the 5′ UTR region upstream of the ATG (predicted by Phytozome, MaizeGDB, GenBank, and/or transcript analysis), 1000 bp of promoter sequence upstream of the 5′ UTR, as well as the coding sequence of the gene including any introns. For soybean, Brassica napus, Camelina sativa, and sorghum bicolor, the sequence size and SEQ ID includes only the 5′ UTR region upstream of the ATG (predicted by Phytozome, GenBank, and/or transcript analysis), and 1000 bp of promoter sequence upstream of the 5′ UTR.
^{²}Strand (+/−) refers to the gRNA binding to either the forward strand of DNA (+) or its reverse complement (−).
^{³}PAM refers to the protospacer adjacent motif for the CAS9 enzyme that resides directly adjacent to the 3′ end of the guide RNA target.
^{⁴}The genome sequence for alfalfa (Medicago sativa) is not publically available. The sequence of a close relative to alfalfa, Medicago truncatula was used to find the dTF22 ortholog. Once the genome sequence of alfalfa (Medicago sativa) is publically available, the dTF22 ortholog can be found by comparison with the Medicago truncatula and switchgrass genes.

TABLE 7
Guide target sequences to edit the coding sequence of dTF22 in major crops

| | | | Guide target #4 | | | Guide target #5 | | |
|---|---|---|---|---|---|---|---|---|
| | | | | Guide | | | Guide | |
| | | Sequence | | sequence | | | sequence | |
| | | size¹, | | target | | | target | |
| Crop | dTF22 ortholog | bp | Strand² | (5′ to 3′) | PAM³ | Strand | (5′ to 3′) | PAM |
| maize | GRMZM2G017319 | 3237 | − | CGTGGATCCA | GGG | + | GAGGACCAGA | CGG |
| | (Protein: SEQ ID | (SEQ ID | | GTCGATGCTG | | | CCGGTGATCA | |
| | NO: 334) | NO: 28) | | (SEQ ID NO: | | | (SEQ ID NO: 577) | |
| | | | | 576) | | | | |
| Medicago | Medtr1g106420 | 1776 | + | TGTTACGAGA | TGG | + | GAATCGGAGTC | GGG |
| truncatula⁴ | (Protein: SEQ ID | (SEQ ID | | TTGTCTAACG | | | TTCCACGTTG | |
| | NO: 489) | NO: 33) | | (SEQ ID NO: | | | (SEQ ID NO: 579) | |
| | | | | 578) | | | | |
| wheat | Traes_4AL_7241716B6 | 3051 | − | GGGAGGCGA | CGG | + | AGCAGCAGGT | GGG |
| | (Protein: SEQ ID | (SEQ ID | | CGAGGCCGGCG | | | GAAGCTGCCG | |
| | NO: 537) | NO: 34)) | | (SEQ ID NO: | | | (SEQ ID NO: 581) | |
| | | | | 580) | | | | |

¹Sequence includes the 5′ UTR region upstream of the ATG (predicted by Phytozome, MaizeGDB, Genbank, and/or transcript analysis), 1000 bp of promoter sequence upstream of the 5′ UTR, as well as the coding sequence of the gene including any introns.
²Strand (+/−) refers to the gRNA binding to either the forward strand of DNA (+) or its reverse complement (−).
³PAM refers to the protospacer adjacent motif for the CAS9 enzyme that resides directly adjacent to the 3′ end of the guide RNA target.
⁴The sequence for alfalfa (Medicago sativa) is not publically available. The sequence of a close relative to alfalfa, Medicago truncatula was used. Once the genome sequence of alfalfa (Medicago sativa) is publically available, the dTF22 ortholog can be found by comparison with the Medicago truncatula and switchgrass genes.

[0250] Crop specific vectors or DNA fragments to edit dTF22 through stable transformation can be designed for multiple crops including maize, rice, soybean, canola, wheat, alfalfa, sorghum, and camelina. These constructs will contain the following expression cassettes: (a) an expression cassette for the Cas9 gene that contains a promoter functional in that crop, the Cas9 gene that includes nuclear localization sequences on the 5′ and 3′ end of the gene, and a terminator; (b) one or more expression cassettes for a guide RNA(s) that consists of a promoter, the guide target sequence with about 20 bp homology upstream of a PAM sequence with the consensus sequence of “NGG”, a gRNA scaffold sequence necessary for Cas9 binding, and a poly T-termination sequence (the promoter for gRNAs is preferably a U6 promoter functional in the crop to be transformed); (c) an expression cassette for a selectable marker that can be used for the specific crop for selection of transformants. For Agrobacterium-mediated transformation, these expression cassettes can be cloned into one or more binary vectors for transformation of the appropriate explant of the crop. For stable transformation by particle bombardment or protoplast transformation, expression cassettes can be introduced as a DNA fragment(s) or can be localized on one or more simple plasmid vectors. For both methods, plants can be screened for edits using Next Generation Sequencing methods. After the edits are obtained, the expression cassettes described above can be removed by segregation using conventional breeding methods for the crop.

[0251] For transient expression of protoplasts, the expression cassettes described above for the Cas9 and the gRNA can be introduced as one or more DNA fragments or can be localized on one or more simple vectors. An expression cassette for a selectable marker is not required. Protoplast cultures or alternatively, callus cultures derived from the protoplast cultures, can be screened for edits using Next Generation Sequencing methods, and protoplast or callus cultures with the edits can be regenerated into plants.

[0252] For editing using ribonucleoprotein complexes or RNPs, purified Cas9 enzyme can be mixed with one or more gRNAs to form a complex of the Cas9 enzyme and the gRNAs which can then be introduced directly to protoplasts. Protoplast cultures or alternatively, callus cultures derived from the protoplast cultures, can be screened for edits using Next Generation Sequencing methods, and protoplast or callus cultures with the edits can be regenerated into plants.

[0253] Examples of transformation methods that can be used for editing are listed below.

[0254] Maize:

[0255] For transformation of maize, a binary vector containing expression cassettes for the Cas9 gene, gRNA(s), and a selectable marker, such as the bar gene imparting resistance to the herbicide bialophos, are prepared. In preparation for transformation, the binary vector is transformed into an Agrobacterium tumefaciens strain, such as A. tumefaciens strain EHA101. Agrobacterium-mediated transformation of maize can be performed following a previously described procedure (Frame et al., 2006, Agrobacterium Protocols Wang K., ed., Vol. 1, pp 185-199, Humana Press) as follows.

[0256] Plant Material:

[0257] Plants grown in a greenhouse are used as an explant source. Ears are harvested 9-13 dafter pollination and surface sterilized with 80% ethanol.

[0258] Explant Isolation, Infection and Co-Cultivation:

[0259] Immature zygotic embryos (1.2-2.0 mm) are aseptically dissected from individual kernels and incubated in an A. tumefaciens strain EHA101 culture containing the transformation vector of interest for genome editing (grown in 5 ml N6 medium supplemented with 100 μM acetosyringone for stimulation of the bacterial vir genes for 2-5 h prior to transformation) at room temperature for 5 min. The infected embryos are transferred scutellum side up on to a co-cultivation medium (N6 agar-solidified medium containing 300 mg/l cysteine, 5 μM silver nitrate and 100 μM acetosyringone) and incubated at 20° C., in the dark for 3 d. Embryos are transferred to N6 resting medium containing 100 mg/l cefotaxime, 100 mg/l vancomycin and 5 μM silver nitrate and incubated at 28° C., in the dark for 7 d.

[0260] Callus Selection:

[0261] All embryos are transferred on to the first selection medium (the resting medium described above supplemented with 1.5 mg/l bialaphos) and incubated at 28° C. in the dark for 2 weeks followed by subculture on a selection medium containing 3 mg/l bialaphos. Proliferating pieces of callus are propagated and maintained by subculture on the same medium every 2 weeks.

[0262] Plant Regeneration and Selection:

[0263] Bialaphos-resistant embryogenic callus lines are transferred on to regeneration medium I (MS basal medium supplemented with 60 g/l sucrose, 1.5 mg/l bialaphos and 100 mg/l cefotaxime and solidified with 3 g/l Gelrite) and incubated at 25° C. in the dark for 2 to 3 weeks. Mature embryos formed during this period are transferred on to regeneration medium II (the same as regeneration medium I with 3 mg/l bialaphos) for germination in the light (25° C., 80-100 μmol/m²/s light intensity, 16/8-h photoperiod). Regenerated plants are ready for transfer to soil within 10-14 days. Plants are grown in the greenhouse to maturity and T1 seeds are isolated.

[0264] Plant tissue from the T1 and T2 generations are screened for edits using Next Generation Sequencing as previously described for rice. The T-DNA insert containing the CRISPR Cas9 editing machinery is removed from the plants, while retaining the edit, via segregation implemented through conventional breeding.

[0265] Soybean:

[0266] For transformation of soybean, a biolistic method is employed. The transformation, selection, and plant regeneration protocol for soybean is adapted from Simmonds (2003) (Simmonds, 2003, Genetic Transformation of Soybean with Biolistics. In: Jackson J F, Linskens H F (eds) Genetic Transformation of Plants. Springer Verlag, Berlin, pp 159-174) and requires expression cassettes for the Cas9 enzyme, the gRNA(s), and a selectable marker, such as the hygromycin resistance marker. These expression cassettes can be co-localized on one plasmid or isolated DNA fragment, or alternatively, two separate plasmids or isolated DNA fragments containing the expression cassettes can be co-bombarded.

[0267] The purified DNA fragment(s) are introduced into embryogenic cultures of soybean Glycine max cultivars X5 and Westag97 via biolistics, to obtain transgenic plants. The transformation, selection, and plant regeneration of soybean is performed as follows.

[0268] Induction and Maintenance of Proliferative Embryogenic Cultures:

[0269] Immature pods, containing 3-5 mm long embryos, are harvested from host plants grown at 28/24° C. (day/night), 15-h photoperiod at a light intensity of 300-400 μmol m⁻² s⁻¹. Pods are sterilized for 30 s in 70% ethanol followed by 15 min in 1% sodium hypochlorite [with 1-2 drops of Tween 20 (Sigma, Oakville, ON, Canada)] and three rinses in sterile water. The embryonic axis is excised and explants are cultured with the abaxial surface in contact with the induction medium [MS salts, B5 vitamins (Gamborg O L, Miller R A, Ojima K. Exp Cell Res 50:151-158), 3% sucrose, 0.5 mg/L BA, pH 5.8), 1.25-3.5% glucose (concentration varies with genotype), 20 mg/l 2,4-D, pH 5.7]. The explants, maintained at 20° C. at a 20-h photoperiod under cool white fluorescent lights at 35-75 μmol m⁻² s⁻¹, are sub-cultured four times at 2-week intervals. Embryogenic clusters, observed after 3-8 weeks of culture depending on the genotype, are transferred to 125-ml Erlenmeyer flasks containing 30 ml of embryo proliferation medium containing 5 mM asparagine, 1-2.4% sucrose (concentration is genotype dependent), 10 mg/l 2,4-D, pH 5.0 and cultured as above at 35-60 μmol m⁻² s⁻¹ of light on a rotary shaker at 125 rpm. Embryogenic tissue (30-60 mg) is selected, using an inverted microscope, for subculture every 4-5 weeks.

[0270] Transformation: Cultures are bombarded 3 days after subculture. The embryogenic clusters are blotted on sterile Whatman filter paper to remove the liquid medium, placed inside a 10×30-mm Petri dish on a 2×2 cm² tissue holder (PeCap, 1 005 μm pore size, Band SH Thompson and Co. Ltd. Scarborough, ON, Canada) and covered with a second tissue holder that is then gently pressed down to hold the clusters in place. Immediately before the first bombardment, the tissue is air dried in the laminar air flow hood with the Petri dish cover off for no longer than 5 min. The tissue is turned over, dried as before, bombarded on the second side and returned to the culture flask. The bombardment conditions used for the Biolistic PDS-I000/He Particle Delivery System are as follows: 737 mm Hg chamber vacuum pressure, 13 mm distance between rupture disc (Bio-Rad Laboratories Ltd., Mississauga, ON, Canada) and macrocarrier. The first bombardment uses 900 psi rupture discs and a microcarrier flight distance of 8.2 cm, and the second bombardment uses 1100 psi rupture discs and 11.4 cm microcarrier flight distance. DNA precipitation onto 1.0 μm diameter gold particles is carried out as follows: 2.5 μl of 100 ng/μl of insert DNA (Cas9 and gRNA(s) expression cassettes) and 2.5 μl of 100 ng/μl selectable marker DNA (cassette for hygromycin selection) are added to 3 mg gold particles suspended in 50 μl sterile dH₂O and vortexed for 10 sec; 50 μl of 2.5 M CaCl₂ is added, vortexed for 5 sec, followed by the addition of 20 μl of 0.1 M spermidine which is also vortexed for 5 sec. The gold is then allowed to settle to the bottom of the microfuge tube (5-10 min) and the supernatant fluid is removed. The gold/DNA is resuspended in 200 μl of 100% ethanol, allowed to settle and the supernatant fluid is removed. The ethanol wash is repeated and the supernatant fluid is removed. The sediment is resuspended in 120 μl of 100% ethanol and aliquots of 8 μl are added to each macrocarrier. The gold is resuspended before each aliquot is removed. The macrocarriers are placed under vacuum to ensure complete evaporation of ethanol (about 5 min).

[0271] Selection:

[0272] The bombarded tissue is cultured on embryo proliferation medium described above for 12 days prior to subculture to selection medium (embryo proliferation medium containing 55 mg/l hygromycin added to autoclaved media). The tissue is sub-cultured 5 days later and weekly for the following 9 weeks. Green colonies (putative transgenic events) are transferred to a well containing 1 ml of selection media in a 24-well multi-well plate that is maintained on a flask shaker as above. The media in multi-well dishes is replaced with fresh media every 2 weeks until the colonies are approx. 2-4 mm in diameter with proliferative embryos, at which time they are transferred to 125 ml Erlenmeyer flasks containing 30 ml of selection medium. A portion of the proembryos from transgenic events is harvested to examine gene expression by RT-PCR.

[0273] Plant Regeneration:

[0274] Maturation of embryos is carried out, without selection, at conditions described for embryo induction. Embryogenic clusters are cultured on Petri dishes containing maturation medium (MS salts, B5 vitamins, 6% maltose, 0.2% gelrite gellan gum (Sigma), 750 mg/l MgCl₂, pH 5.7) with 0.5% activated charcoal for 5-7 days and without activated charcoal for the following 3 weeks. Embryos (10-15 per event) with apical meristems are selected under a dissection microscope and cultured on a similar medium containing 0.6% phytagar (Gibco, Burlington, ON, Canada) as the solidifying agent, without the additional MgCl₂, for another 2-3 weeks or until the embryos become pale yellow in color. A portion of the embryos from transgenic events after varying times on gelrite are harvested to examine gene expression by RT-PCR.

[0275] Mature embryos are desiccated by transferring embryos from each event to empty Petri dish bottoms that are placed inside Magenta boxes (Sigma) containing several layers of sterile Whatman filter paper flooded with sterile water, for 100% relative humidity. The Magenta boxes are covered and maintained in darkness at 20° C. for 5-7 days. The embryos are germinated on solid B5 medium containing 2% sucrose, 0.2% gelrite and 0.075% MgCl₂ in Petri plates, in a chamber at 20° C., 20-h photoperiod under cool white fluorescent lights at 35-75 μmol m⁻² s⁻¹. Germinated embryos with unifoliate or trifoliate leaves are planted in artificial soil (Sunshine Mix No. 3, SunGro Horticulture Inc., Bellevue, Wash., USA), and covered with a transparent plastic lid to maintain high humidity. The flats are placed in a controlled growth cabinet at 26/24° C. (day/night), 18 h photoperiod at a light intensity of 150 μmol m⁻² s⁻¹. At the 2-3 trifoliate stage (2-3 weeks), the plantlets with strong roots are transplanted to pots containing a 3:1:1:1 mix of ASB Original Grower Mix (a peat-based mix from Greenworld, ON, Canada): soil:sand:perlite and grown at 18-h photoperiod at a light intensity of 300-400 μmol m⁻² s⁻¹.

[0276] T1 seeds are harvested and planted in soil and grown in a controlled growth cabinet at 26/24° C. (day/night), 18 h photoperiod at a light intensity of 300-400 μmol m⁻² s⁻¹. Plants are grown to maturity and T2 seed is harvested.

[0277] Plant tissue from the T1 and T2 generations are screened for edits using Next Generation Sequencing as previously described for rice.

[0278] Brassica napus:

[0279] Agrobacterium-mediated transformation of Brassica napus can be performed as follows.

[0280] In preparation for plant transformation experiments, seeds of Brassica napus cv DH12075 (obtained from Agriculture and Agri-Food Canada) are surface sterilized with sufficient 95% ethanol for 15 seconds, followed by 15 minutes incubation with occasional agitation in full strength Javex (or other commercial bleach, 7.4% sodium hypochlorite) and a drop of wetting agent such as Tween 20. The Javex solution is decanted and 0.025% mercuric chloride with a drop of Tween 20 is added and the seeds are sterilized for another 10 minutes. The seeds are then rinsed three times with sterile distilled water. The sterilized seeds are plated on half strength hormone-free Murashige and Skoog (MS) media (Murashige T, Skoog F (1962). Physiol Plant 15:473-498) with 1% sucrose in 15×60 mm petri dishes that are then placed, with the lid removed, into a larger sterile vessel (Majenta GA7 jars). The cultures are kept at 25° C., with 16 h light/8h dark, under approx. 70-80 μmol m⁻² s⁻¹ of light intensity in a tissue culture cabinet. 4-5 days old seedlings are used to excise fully unfolded cotyledons along with a small segment of the hypocotyl. Excisions are made so as to ensure that no part of the apical meristem is included.

[0281] The Agrobacterium strain GV3101 carrying the transformation vector for genome editing is grown overnight in 5 ml of LB media with 50 mg/L kanamycin, gentamycin, and rifampicin. The culture is centrifuged at 2000 g for 10 min., the supernatant is discarded and the pellet is suspended in 5 ml of inoculation medium (Murashige and Skoog with B5 vitamins [MS/B5; Gamborg O L, Miller R A, Ojima K. Exp Cell Res 50:151-158], 3% sucrose, 0.5 mg/L benzyl aminopurine (BA), pH 5.8). Cotyledons are collected in Petri dishes with ˜1 ml of sterile water to keep them from wilting. The water is removed prior to inoculation and explants are inoculated in mixture of 1 part Agrobacterium suspension and 9 parts inoculation medium in a final volume sufficient to bathe the explants. After explants are well exposed to the Agrobacterium solution and inoculated, a pipet is used to remove any extra liquid from the petri dishes.

[0282] The Petri plates containing the explants incubated in the inoculation media are sealed and kept in the dark in a tissue culture cabinet set at 25° C. After 2 days the cultures are transferred to 4° C. and incubated in the dark for 3 days. The cotyledons, in batches of 10, are then transferred to selection medium consisting of Murashige Minimal Organics (Sigma), 3% sucrose, 4.5 mg/L BA, 500 mg/L MES, 27.8 mg/L Iron (II) sulfate heptahydrate, pH 5.8, 0.7% Phytagel with 300 mg/L timentin, and 2 mg/L L-phosphinothricin (L-PPT) added after autoclaving. The cultures are kept in a tissue culture cabinet set at 25° C., 16 h/8h, with a light intensity of about 125 μmol m⁻² s⁻¹. The cotyledons are transferred to fresh selection every 3 weeks until shoots are obtained. The shoots are excised and transferred to shoot elongation media containing MS/B5 media, 2% sucrose, 0.5 mg/L BA, 0.03 mg/L gibberellic acid (GA₃), 500 mg/L 4-morpholineethanesulfonic acid (MES), 150 mg/L phloroglucinol, pH 5.8, 0.9% Phytagar and 300 mg/L timentin and 3 mg/L L-phosphinothricin added after autoclaving. After 3-4 weeks any callus that formed at the base of shoots with normal morphology is cut off and shoots are transferred to rooting media containing half strength MS/B5 media with 1% sucrose and 0.5 mg/L indole butyric acid, 500 mg/L MES, pH 5.8, 0.8% agar, with 1.5 mg/L L-PPT and 300 mg/L timentin added after autoclaving. The plantlets with healthy shoots are hardened and transferred to 6″ pots in the greenhouse to collect T1 transgenic seeds.

[0283] Plant tissue from the T1 and T2 generations are screened for edits using Next Generation Sequencing as previously described for rice.

[0284] Transformation of protoplasts of Brassica napus can be performed as follows.

[0285] Protoplast Isolation:

[0286] Seeds of Brassica napus are surface sterilized with 70% ethanol for 2 min followed by gentle shaking in 0.4% hypochlorite solution for 20 min. The seeds are washed three times in double distilled water, and sown on sterilized ½ MS media in Petri plates that are placed without the lids in sterile Majenta jars. Protoplasts are isolated from 40 newly expanding leaves of Brassica plants. The mid vein is removed and the abaxial surface of the leaves are gently scored with a sterile scalpel. The leaves are then floated with abaxial side down in Petri plates containing 15 ml of Enzyme B2 solution (B5 salts, 1% Onozuka R 10, 0.2% Macerozyme R 10, 13% sucrose, 5 mM CaCl2.2H2O, 0.5% Polyvinylpyrrolidone, 1 mg/L NAA, 1 mg/L 2, 4-D, 1 mg/L BA, MES 0.05%, pH 6.0). Petri plates are sealed with Parafilm and leaves incubated overnight at 22° C. in the dark without shaking. Following the overnight incubation the plates are gently agitated by hand and incubation continued for 15-20 min on a rotary shaker set at 20 rpm. The digested material, consisting of a crude protoplast suspension, is then filtered through a funnel lined with 63 μm nylon screen and the filtrate collected in 50 ml falcon centrifuge tubes. An equal volume of 17% B5 wash solution (B5 salts, 5 mM CaCl2.2H2O, 17% sucrose, 0.06% MES, pH 6.0) is added to the filtrate and centrifuged at 100 g for 10 minutes. The protoplast enriched fraction (˜4 ml) floating in the form of a ring is carefully removed and transferred to fresh 15 ml falcon tubes and 11 ml of WW5-2 media (0.1 M CaCl2.2H2O, 0.2 M NaCl, 4 mM KCl, 0.08% Glucose, 0.1% MES, pH 6.0) is added per tube. The resulting suspension is gently mixed by inversion and then centrifuged at 100 g for 5 minutes. After centrifugation the supernatant is carefully decanted and discarded and the pellet consisting of an enriched protoplast fraction is retained. Protoplasts are washed twice with WW5-2 solution followed by centrifugation at 100 g and resuspended in 5 ml of WW5-2 media. The density of protoplasts is counted with a hemocytometer using a small drop of the protoplast suspension. The suspension is cooled in a refrigerator (2-8° C.) for 40-45 min.

[0287] Brassica napus protoplast transfection and culture: For protoplast transfection, the protoplasts after cold incubation are pelleted by centrifugation at 100 g for 3 minutes and then resuspended in WMMM media (15 mM MgCl₂-6H₂O, 0.4 M Mannitol, 0.1 M (CaNO₃)₂, 0.1% MES, pH 6) to a density of 2×10⁶ protoplasts per ml. 500 μl of protoplast suspension is dispensed into 15 ml falcon tubes and 50 μl of a mixture consisting of 50 μg of DNA containing the genetic construct for editing is added to the protoplast suspension and mixed by shaking. 500 μl of PEGB2 (40% PEG 4000, 0.4 M Mannitol, 0.1 M Calcium Nitrate, 0.1% MES, pH 6.0) is added gently to the protoplast DNA mixture while continuously shaking the tube. The mixture is incubated for 20 min with periodic gentle shaking. Subsequently WW5-2 media is gradually added in two stages, first a 5 ml aliquot of WW5-2 is added to the protoplast mixture which is then allowed to incubate for 10 minutes followed by addition of a second 5 ml aliquot of WW5-2 solution and incubation for 10 min. After the second incubation, the protoplasts are carefully resuspended and then pelleted by centrifugation. The protoplast pellet is resuspended in 12 ml of WW5-2 solution then pelleted by centrifugation at 100 g for 5 min. The pellet is washed once more in 10 ml of WW5-2 then pelleted by centrifugation at 100 g for 3 min. The protoplast pellet is resuspended in K3P4 medium (Kao's basal salts, 6.8% Glucose, 1% MES, 0. 5% Ficoll 400, 2 mM CaCl₂.2H₂O, 1 mg/L 2, 4-D, 1 mg/L NAA, 1 mg/L Zeatin, pH 5.8, 200 mg/L Carbenicillin, 200 mg/L Cefotaxime) at a density of 1×10⁵ protoplasts per ml and 1.5 ml of the suspension is dispensed per 60×15 mm petri plate. The plates are sealed with Parafilm and maintained in plastic boxes with opaque lids at 22° C., 16 h photoperiod, under dim fluorescent lights (25 μmol m⁻² s⁻¹).

[0288] Brassica napus—Proliferation of Calli and Regeneration of Edited Lines:

[0289] After 4-5 days the protoplast cultures are fed with 1-1.25 ml of medium consisting of a 1:1 mixture of K3P4 medium and EmBed BI medium (MS Basal salts, 3.4% sucrose, 0.05% MES, 1 mg/L NAA, 1 mg/L 2,4-D and 1 mg/L BA, pH 6.0). The plates are resealed and placed under dim light for 1-2 days and then under medium light (60-80 μmol m⁻² s⁻¹). After 4-5 days, the protoplasts are fed with 4.5 ml of a 3:1 mixture of K3P4: Embed BI medium. The plate contents are then transferred to a 100×75 mm plate and 3 ml of lukewarm Embed BI medium containing 2.1% SeaPlaque agarose is added to the protoplast suspension. The contents of the plate are swirled to gently mix the protoplast suspension with the semi-solid media and the plates are allowed to solidify in the tissue culture flow hood. Plates are sealed and cultured under dim light conditions for a week. After 7-9 days, the embedded protoplast cultures in each plate are cut into 6-8 wedges and transferred onto two plates of Proliferation B1 media (MS Basal salts, 3.4% sucrose, 0.05% MES, 1 mg/L NAA, 1 mg/L 2,4-D and 1 mg/L BA, pH 6.0, 0.8% sea plaque agarose, 200 mg/L Carbenicillin, 200 mg/L Cefotaxime) with appropriate selection for the DNA insert if stable transformation for genome editing is being performed. For transient editing, no selection is required. Proliferation plates are incubated under dim light for first 1-2 days and then moved to bright light (150 μmol m⁻² s⁻¹). Green surviving colonies are obtained after 3 to 4 weeks at which point they are transferred to fresh Proliferation B 1 plates for an additional 2-3 weeks. Large green calli are transferred to Regeneration B2 Plates (MS Basal salts, 3% sucrose, 30 μM AgNO₃, 0.05% polyvinylpyrrolidone, 0.05% MES, 0.1 mg/L NAA, 5 mg/l N6-(2-isopentenyl)adenine (2-iP), 0.1 μg/L GA3, pH 5.8, 0.8% sea plaque agarose, 100 mg/L Carbenicillin, 100 mg/L Cefotaxime) with appropriate selection, if required. Calli are transferred to fresh Regeneration B2 plates every 3 to 4 weeks. Shoots with normal morphology are transferred to rooting medium (B5 salts+0.1 mg/L NAA) and incubated under dim light conditions. Plantlets are potted in a soilless mix (Sunshine Mix 4) in 6″ pots and irrigated with NPK (20-20-20) fertilizer. Plantlets are acclimatized under plastic cups for 5-6 days and maintained in a growth room at 22° C./18° C. and a 16 hour photoperiod under 200-300 μmol m⁻² s⁻¹ light. Plants are transferred to a greenhouse and grown until T1 seed set.

[0290] Plant tissue from the T1 and T2 generations are screened for edits using Next Generation Sequencing as previously described for rice.

[0291] Camelina:

[0292] In preparation for plant transformation experiments, seeds of Camelina sativa germplasm 10CS0043 (abbreviated WT43, obtained from Agriculture and Agri-Food Canada) are sown directly into 4 inch (10 cm) pots filled with soil in the greenhouse. Growth conditions are maintained at 24° C. during the day and 18° C. during the night. Plants are grown until flowering. Plants with a number of unopened flower buds are used in ‘floral dip’ transformations.

[0293] Agrobacterium strain GV3101 (pMP90) is transformed with the binary editing construct using electroporation. A single colony of GV3101 (pMP90) containing the construct of interest is obtained from a freshly streaked plate and is inoculated into 5 mL LB medium. After overnight growth at 28° C., 2 mL of culture is transferred to a 500-mL flask containing 300 mL of LB and incubated overnight at 28° C. Cells are pelleted by centrifugation (6,000 rpm, 20 min), and diluted to an OD600 of −0.8 with infiltration medium containing 5% sucrose and 0.05% (v/v) Silwet-L77 (Lehle Seeds, Round Rock, Tex., USA). Camelina plants are transformed by “floral dip” using the transformation constructs as follows. Pots containing plants at the flowering stage are placed inside a 460 mm height vacuum desiccator (Bel-Art, Pequannock, N.J., USA). Inflorescences are immersed into the Agrobacterium inoculum contained in a 500-ml beaker. A vacuum (85 kPa) is applied and held for 5 min. Plants are removed from the desiccator and are covered with plastic bags in the dark for 24 h at room temperature. Plants are removed from the bags and returned to normal growth conditions within the greenhouse for seed formation (T1 generation of seed).

[0294] Where a visual marker is used such as DsRed, a red fluorescent protein from the Discoma genus of coral (Matz et al., 1999, Nat. Biotechnol. 17, 969-973), transgenic seeds are selected based on their fluorescence as previously described (Malik et al., Plant Biotechnol. J., 2015, 13, 675-688).

[0295] Where the bar gene is used as a selectable marker on the binary construct, T1 seeds are planted in soil and transgenic plants are selected by spraying a solution of 400 mg/L of the herbicide Liberty (active ingredient 15% glufosinate-ammonium). This allows identification of transgenic plants containing the bar gene on the T-DNA in the plasmid vectors.

[0296] Plant tissue from the T1 and T2 generations are screened for edits using Next Generation Sequencing as previously described for rice.

[0297] Those skilled in the art will understand that there are many transformation methods available for each crop and each of these procedures will be useful for practicing the invention as long the procedure produces a transiently or stably transformed explant (leaf, callus, protoplast, cell suspension culture, seed, seedling, flower, immature inflorescence, inflorescence, cotyledons, cotyledons with a small segment of the hypocotyl, etc.) that is capable of forming a regenerated plant or a viable seed that contains an edit.

### Example 5. Identification of Maize Orthologs to Switchgrass dTFs

[0298] The switchgrass dTF genes were used to identify maize orthologs of each dTF as follows: the switchgrass amino acid sequence of each dTF was blasted against the maize proteome (Phytozome-Ensemlb-18). The hits were ranked in order of the alignment score and the top hit was identified as the best ortholog and the three subsequent hits were labeled as homologues (Table 8). Each maize amino acid sequence was aligned pairwise with the switchgrass sequence to determine the percent coverage and percent similarity.

[0299] Guide target sequences were designed to produce sgRNAs to edit each of the dTFs in Table 8 and these guides target sequences are shown in Table 9. The strategy for using these guide target sequences to produce sgRNAs for editing different regions of the promoter or coding sequence of the maize dTFs, or excising larger fragments from the promoter and CDS of the maize dTFs, is outlined in FIGS. 6 and 7.

TABLE 8
Maize orthologs and homologs of switchgrass downregulated
downstream transcription factor genes¹

| | | Maize Ortholog | |
|---|---|---|---|
| | | (% coverage of and % | Maize homolog 1 |
| | | identity to switchgrass | (% coverage of and % identity |
| Gene | Switchgrass Gene | gene) | to switchgrass gene) |
| dTF1 | Pavirv00029177m | GRMZM2G049378 (89%, | GRMZM2G121753 (89%, |
| | (Gene: SEQ ID NO: 1, | 78%) | 75%) |
| | Protein: SEQ ID NO: 289) | (Gene: SEQ ID NO: 35, | (Gene: SEQ ID NO: 57, |
| | | Protein: SEQ ID NO: 313) | Protein: SEQ ID NO: 335) |
| dTF2 | Pavirv00003507m | GRMZM2G158117 (75%, | GRMZM2G117497 (73%, |
| | (Gene: SEQ ID NO: 2, | 86%) | 85%) |
| | Protein: SEQ ID NO: 290) | (Gene: SEQ ID NO: 36, | (Gene: SEQ ID NO: 58, |
| | | Protein: SEQ ID NO: 314) | Protein: SEQ ID NO: 336) |
| dTF3 | AP13CTG12699 at | Zm00001d017782 (69%, | GRMZM2G114503 (64%, |
| | (Gene: SEQ ID NO: 3, | 64%) | 62%) |
| | Protein: SEQ ID NO: 291) | (Gene: SEQ ID NO: 37, | (Gene: SEQ ID NO: 59, |
| | | Protein: SEQ ID NO: 315) | Protein: SEQ ID NO: 337) |
| dTF4 | Pavirv00024770m | GRMZM2G007063 (87%, | GRMZM2G015534 (98%, |
| | (Gene: SEQ ID NO: 4, | 40%) | 50%) |
| | Protein: SEQ ID NO: 292) | (Gene: SEQ ID NO: 38, | (Gene: SEQ ID NO: 60, |
| | | Protein: SEQ ID NO: 316) | Protein: SEQ ID NO: 338) |
| dTF5 | Pavirv00012672m | GRMZM2G124540 | GRMZM2G171468 (92%, |
| | (Gene: SEQ ID NO: 5, | (100%, 74%) | 68%) |
| | Protein: SEQ ID NO: 293) | (Gene: SEQ ID NO: 39, | (Gene: SEQ ID NO: 61, |
| | | Protein: SEQ ID NO: 317) | Protein: SEQ ID NO: 339) |
| dTF6 | Pavirv00006905m | GRMZM2G021777 | AC233888.1 |
| | (Gene: SEQ ID NO: 6, | (100%, 79%) | (87%, 79%) |
| | Protein: SEQ ID NO: 294) | (Gene: SEQ ID NO: 40, | (Gene: SEQ ID NO: 62, |
| | | Protein: SEQ ID NO: 318) | Protein: SEQ ID NO: 340) |
| dTF7 | Pavirv00011545m | GRMZM2G073427 (80%, | GRMZM2G019446 (75%, |
| | (Gene: SEQ ID NO: 7, | 62%) | 36%) |
| | Protein: SEQ ID NO: 295) | (Gene: SEQ ID NO: 41, | (Gene: SEQ ID NO: 63, |
| | | Protein: SEQ ID NO: 319) | Protein: SEQ ID NO: 341) |
| dTF8 | Pavirv00039321m | GRMZM2G380377 (97%, | GRMZM2G042756 (64%, |
| | (Gene: SEQ ID NO: 8, | 64%) | 71%) |
| | Protein: SEQ ID NO: 296) | (Gene: SEQ ID NO: 42, | (Gene: SEQ ID NO: 64, |
| | | Protein: SEQ ID NO: 320) | Protein: SEQ ID NO: 342) |
| dTF9 | Pavirv00007251m | GRMZM2G351330 (87%, | GRMZM2G117164 (87%, |
| | (Gene: SEQ ID NO: 9, | 76%) | 56%) |
| | Protein: SEQ ID NO: 297) | (Gene: SEQ ID NO: 43, | (Gene: SEQ ID NO: 65, |
| | | Protein: SEQ ID NO: 321) | Protein: SEQ ID NO: 343) |
| dTF10 | AP13ITG41879_s_at | GRMZM2G105348 (97%, | GRMZM2G118047 (96%, |
| | (Gene: SEQ ID NO: 10, | 74%) | 56%) |
| | Protein: SEQ ID NO: 298) | (Gene: SEQ ID NO: 44, | (Gene: SEQ ID NO: 66, |
| | | Protein: SEQ ID NO: 322) | Protein: SEQ ID NO: 344) |
| dTF11 | Pavirv00007239m | GRMZM2G137046 (85%, | GRMZM2G140355 (82%, |
| | (Gene: SEQ ID NO: 11, | 73%) | 82%) |
| | Protein: SEQ ID NO: 299) | (Gene: SEQ ID NO: 45, | (Gene: SEQ ID NO: 67, |
| | | Protein: SEQ ID NO: 323) | Protein: SEQ ID NO: 345) |
| dTF12 | Pavirv00003464m | GRMZM2G083472 (66%, | GRMZM2G010920 (81%, |
| | (Gene: SEQ ID NO: 12, | 83%) | 62%) |
| | Protein: SEQ ID NO: 300) | (Gene: SEQ ID NO: 46, | (Gene: SEQ ID NO: 68, |
| | | Protein: SEQ ID NO: 324) | Protein: SEQ ID NO: 346) |
| dTF13 | Pavirv00006072m | GRMZM2G018984 | GRMZM2G018398 (97%, |
| | (Gene: SEQ ID NO: 13, | (100%, 66%) | 34%) |
| | Protein: SEQ ID NO: 301) | (Gene: SEQ ID NO: 47, | (Gene: SEQ ID NO: 69, |
| | | Protein: SEQ ID NO: 325) | Protein: SEQ ID NO: 347) |
| dTF14 | Pavirv00000078m | GRMZM2G150260 (98%, | GRMZM2G114503 |
| | (Gene: SEQ ID NO: 14, | 72%) | (100%, 76%) |
| | Protein: SEQ ID NO: 302) | (Gene: SEQ ID NO: 48, | (Gene: SEQ ID NO: 59, |
| | | Protein: SEQ ID NO: 326) | Protein: SEQ ID NO: 337) |
| dTF15 | Pavirv00012008m | GRMZM2G470422 (96%, | GRMZM2G075956 (76%, |
| | (Gene: SEQ ID NO: 15, | 66%) | 58%) |
| | Protein: SEQ ID NO: 303) | (Gene: SEQ ID NO: 49, | (Gene: SEQ ID NO: 70, |
| | | Protein: SEQ ID NO: 327) | Protein: SEQ ID NO: 348) |
| dTF16 | AP13CTG14279ST_s_at | GRMZM2G048582 (96%, | GRMZM2G053298 (95%, |
| | (Gene: SEQ ID NO: 16, | 86%) | 88%) |
| | Protein: SEQ ID NO: 304) | (Gene: SEQ ID NO: 50, | (Gene: SEQ ID NO: 71, |
| | | Protein: SEQ ID NO: 328) | Protein: SEQ ID NO: 349) |
| dTF17 | Pavirv00053825m | GRMZM2G010871 (98%, | GRMZM2G165972 (90%, |
| | (Gene: SEQ ID NO: 17, | 87%) | 58%) |
| | Protein: SEQ ID NO: 305) | Gene: SEQ ID NO: 51, | (Gene: SEQ ID NO: 72, |
| | | Protein: SEQ ID NO: 329) | Protein: SEQ ID NO: 350) |
| dTF18 | Pavirv00008285m | GRMZM2G405368 | AC233888.1 |
| | (Gene: SEQ ID NO: 18, | (100%, 70%) | (93%, 37%) |
| | Protein: SEQ ID NO: 306) | (Gene: SEQ ID NO: 52, | (Gene: SEQ ID NO: 62, |
| | | Protein: SEQ ID NO: 330) | Protein: SEQ ID NO: 340) |
| dTF19 | Pavirv00010659m | GRMZM2G070034 (97%, | GRMZM2G171365 (98%, |
| | (Gene: SEQ ID NO: 19, | 80%) | 59%) |
| | Protein: SEQ ID NO: 307) | (Gene: SEQ ID NO: 53, | (Gene: SEQ ID NO: 73, |
| | | Protein: SEQ ID NO: 331) | Protein: SEQ ID NO: 351) |
| dTF20 | Pavirv00067953m | GRMZM2G441325 | GRMZM2G056120 (95%, |
| | (Gene: SEQ ID NO: 20, | (100%, 69%) | 42%) |
| | Protein: SEQ ID NO: 308) | (Gene: SEQ ID NO: 54, | (Gene: SEQ ID NO: 74, |
| | | Protein: SEQ ID NO: 332) | Protein: SEQ ID NO: 352) |
| dTF21 | Pavirv00005696m | GRMZM2G042895 (93%, | GRMZM2G119823 (70%, |
| | (Gene: SEQ ID NO: 21, | 44%) | 51%) |
| | Protein: SEQ ID NO: 309) | (Gene: SEQ ID NO: 55, | (Gene: SEQ ID NO: 75, |
| | | Protein: SEQ ID NO: 333) | Protein: SEQ ID NO: 353) |
| dTF22 | Pavirv00012971m | GRMZM2G017319 (94% | GRMZM2G044902 (99%, |
| | (Gene: SEQ ID NO: 22, | 76%) | 48%) |
| | Protein: SEQ ID NO: 310) | (Gene: SEQ ID NO: 56, | (Gene: SEQ ID NO: 76, |
| | | Protein: SEQ ID NO: 334) | Protein: SEQ ID NO: 354) |
| dTF59 | Pavirv00056268m | GRMZM2G089501 | GRMZM2G009478 |
| | (Gene: SEQ ID NO: 23, | (76%, 62%) | (81%, 61%) |
| | Protein: SEQ ID NO: 311) | (Gene: SEQ ID NO: 110, | (Gene: SEQ ID NO: 112, |
| | | Protein: SEQ ID NO: 388) | Protein: SEQ ID NO: 390) |
| dTF60 | Pavirv00036358m | GRMZM2G000520 | GRMZM2G368838 |
| | (Gene: SEQ ID NO: 24, | (96%, 63%) | (100%, 77%) |
| | Protein: SEQ ID NO: 312) | (Gene: SEQ ID NO: 111, | (Gene: SEQ ID NO: 113, |
| | | Protein: SEQ ID NO: 389) | Protein: SEQ ID NO: 391) |

| | Maize homolog 2 | Maize homolog 3 |
|---|---|---|
| | (% coverage of and % identity | (% coverage of and % |
| Gene | to switchgrass gene) | identity to switchgrass gene) |
| dTF1 | GRMZM2G158117 | GRMZM2G117497 (80%, |
| | (79%, 73%) | 69%) |
| | (Gene: SEQ ID NO: 36, | (Gene: SEQ ID NO: 58, |
| | Protein: SEQ ID NO: 314) | Protein: SEQ ID NO: 336) |
| dTF2 | GRMZM2G049378 (76%, | GRMZM2G121753 (97%, |
| | 62%) | 59%) |
| | (Gene: SEQ ID NO: 35, | (Gene: SEQ ID NO: 57, |
| | Protein: SEQ ID NO: 313) | Protein: SEQ ID NO: 335) |
| dTF3 | GRMZM2G031441 (82%, | GRMZM2G451116 (87%, |
| | 51%) | 57%) |
| | (Gene: SEQ ID NO: 77, | (Gene: SEQ ID NO: 94, |
| | Protein: SEQ ID NO: 355) | Protein: SEQ ID NO: 372) |
| dTF4 | GRMZM2G016150 (98%, | GRMZM2G019446 (72%, |
| | 40%) | 45%) |
| | (Gene: SEQ ID NO: 78, | (Gene: SEQ ID NO: 63, |
| | Protein: SEQ ID NO: 356) | Protein: SEQ ID NO: 341) |
| dTF5 | GRMZM2G173882 (100%, | GRMZM2G100176 (90%, |
| | 55%) | 53%) |
| | (Gene: SEQ ID NO: 79, | (Gene: SEQ ID NO: 95, |
| | Protein: SEQ ID NO: 357) | Protein: SEQ ID NO: 373) |
| dTF6 | GRMZM2G095598 (98%, | GRMZM2G038783 (52%, |
| | 52%) | 71%) |
| | (Gene: SEQ ID NO: 80, | (Gene: SEQ ID NO: 96, |
| | Protein: SEQ ID NO: 358) | Protein: SEQ ID NO: 374) |
| dTF7 | not found | not found |
| dTF8 | GRMZM2G137341 (75%, | GRMZM2G069126 (58%, |
| | 58%) | 68%) |
| | (Gene: SEQ ID NO: 81, | (Gene: SEQ ID NO: 97, |
| | Protein: SEQ ID NO: 359) | Protein: SEQ ID NO: 375) |
| dTF9 | GRMZM2G396527 (41%, | GRMZM2G041462 (84%, |
| | 85%) | 40%) |
| | (Gene: SEQ ID NO: 82, | (Gene: SEQ ID NO: 98, |
| | Protein: SEQ ID NO: 360) | Protein: SEQ ID NO: 376) |
| dTF10 | GRMZM2G086880 (77%, | GRMZM2G089525 (73%, |
| | 55%) | 54%) |
| | (Gene: SEQ ID NO: 83, | (Gene: SEQ ID NO: 99, |
| | Protein: SEQ ID NO: 361) | Protein: SEQ ID NO: 377) |
| dTF11 | GRMZM2G171912 (73%, | GRMZM2G039828 (73%, |
| | 62%) | 59%) |
| | (Gene: SEQ ID NO: 84, | (Gene: SEQ ID NO: 100, |
| | Protein: SEQ ID NO: 362) | Protein: SEQ ID NO: 378) |
| dTF12 | GRMZM2G173943 (32%, | GRMZM2G117854 (37%, |
| | 56%) | 54%) |
| | (Gene: SEQ ID NO: 85, | (Gene: SEQ ID NO: 101, |
| | Protein: SEQ ID NO: 363) | Protein: SEQ ID NO: 379) |
| dTF13 | GRMZM2G171179 (100%, | GRMZM2G052667 (51%, |
| | 32%) | 76%) |
| | (Gene: SEQ ID NO: 86, | (Gene: SEQ ID NO: 102, |
| | Protein: SEQ ID NO: 364) | Protein: SEQ ID NO: 380) |
| dTF14 | GRMZM2G049378 (72%, | GRMZM2G451116 (61%, |
| | 59%) | 71%) |
| | (Gene: SEQ ID NO: 35, | (Gene: SEQ ID NO: 94, |
| | Protein: SEQ ID NO: 313) | Protein: SEQ ID NO: 372) |
| dTF15 | GRMZM2G129428 (95%, | GRMZM2G068710 (67%, |
| | 43%) | 49%) |
| | (Gene: SEQ ID NO: 87, | (Gene: SEQ ID NO: 103, |
| | Protein: SEQ ID NO: 365) | Protein: SEQ ID NO: 381) |
| dTF16 | GRMZM2G466549 (66%, | GRMZM2G143566 (34%, |
| | 73%) | 87%) |
| | (Gene: SEQ ID NO: 88, | (Gene: SEQ ID NO: 104, |
| | Protein: SEQ ID NO: 366) | Protein: SEQ ID NO: 382) |
| dTF17 | GRMZM2G125969 (91%, | GRMZM2G132971 (90%, |
| | 55%) | 55%) |
| | (Gene: SEQ ID NO: 89, | (Gene: SEQ ID NO: 105, |
| | Protein: SEQ ID NO: 367) | Protein: SEQ ID NO: 383) |
| dTF18 | GRMZM2G095598 (93%, | GRMZM2G021777 (41%, |
| | 36%) | 44%) |
| | (Gene: SEQ ID NO: 80, | (Gene: SEQ ID NO: 40, |
| | Protein: SEQ ID NO: 358) | Protein: SEQ ID NO: 318) |
| dTF19 | GRMZM2G026223 (96%, | GRMZM2G102161 |
| | 61%) | (60%, 40%) |
| | (Gene: SEQ ID NO: 90, | (Gene: SEQ ID NO: 106, |
| | Protein: SEQ ID NO: 368) | Protein: SEQ ID NO: 384) |
| dTF20 | GRMZM5G874163 (95%, | GRMZM2G030710 (92%, |
| | 42%) | 31%) |
| | (Gene: SEQ ID NO: 91, | (Gene: SEQ ID NO: 107, |
| | Protein: SEQ ID NO: 369) | Protein: SEQ ID NO: 385) |
| dTF21 | GRMZM2G042893 (73%, | GRMZM2G076636 (43%, |
| | 49%) | 60%) |
| | (Gene: SEQ ID NO: 92, | (Gene: SEQ ID NO: 108, |
| | Protein: SEQ ID NO: 370) | Protein: SEQ ID NO: 386) |
| dTF22 | GRMZM2G177110 (99%, | GRMZM2G073044 |
| | 47%) | (49%/61%) |
| | (Gene: SEQ ID NO: 93, | (Gene: SEQ ID NO: 109, |
| | Protein: 371) | Protein: SEQ ID NO: 387) |
| dTF59 | GRMZM2G317450 (63%, | GRMZM5G839518 (31%, |
| | 49%) | 48%) |
| | (Gene: SEQ ID NO: 114, | (Gene: SEQ ID NO: 116, |
| | Protein: SEQ ID NO: 392) | Protein: SEQ ID NO: 394) |
| dTF60 | GRMZM2G434203 (97%, | GRMZM2G047918 (39%, |
| | 63%) | 62%) |
| | (Gene: SEQ ID NO: 115, | (Gene: SEQ ID NO: 117, |
| | Protein: SEQ ID NO: 393) | Protein: SEQ ID NO: 395) |

¹Gene sequence deposited under SEQ ID contains only the coding sequence of the gene.

TABLE 9
Guide target sequences for Cas9 mediated genome editing of promoters
and/or coding sequences of transcription factor genes in maize.

| | | | Guide target #1 | | | Guide target #2 | | | Guide target #3 | | |
|---|---|---|---|---|---|---|---|---|---|---|---|
| | | | | Guide | | | Guide | | | Guide | |
| | | | | target | | | target | | | target | |
| | | Sequence | | sequence | | | sequence | | | sequence | |
| | Maize | size¹, | | (5′ to | | | (5′ to | | | (5′ to | |
| Gene | ortholog | bp | Strand² | 3′) | PAM³ | Strand | 3′) | PAM | Strand | 3′) | PAM |
| dTF1 | GRMZM2G049378 | 1450 | − | TTTGATCTCG | AGG | + | TTTCAACTGCTATT | TGG | + | GCGATAC | TGG |
| | (Protein: | (SEQ | | TTGCTGCTAT | | | AGGGTA (SEQ ID | | | ATTGATA | |
| | SEQ ID NO: | ID | | (SEQ ID | | | NO: 583) | | | CATACG | |
| | 313) | NO: | | NO: 582) | | | | | | (SEQ ID | |
| | | 118) | | | | | | | | NO: 584) | |
| dTF2 | GRMZM2G158117 | 2083 | − | TATCCTCTGT | AGG | − | TCAAACATACACTT | TGG | + | ATGAATC | AGG |
| | (Protein: SEQ | (SEQ | | TGGTGCGCTA | | | TCCAGG (SEQ ID | | | GACCTGC | |
| | ID NO: 314) | ID | | (SEQ ID | | | NO: 588) | | | CACTTA | |
| | | NO: | | NO: 587) | | | | | | (SEQ ID | |
| | | 119) | | | | | | | | NO: 589) | |
| dTF3 | Zm00001d017782 | 1392 | − | CACCTAGCTA | AGG | − | TTATTGGACCAGA | GGG | − | TTAGTGT | TGG |
| | (Protein: | (SEQ | | GGAGAGATGC | | | AAGGGTA (SEQ ID | | | TATCGTG | |
| | SEQ ID NO: | ID | | (SEQ ID | | | NO: 593) | | | ACATAC | |
| | 315) | NO: | | NO: 592) | | | | | | (SEQ ID | |
| | | 120) | | | | | | | | NO: 594) | |
| dTF4 | GRMZM2G007063 | 4472 | − | AATTTCTCGG | TGG | − | AGGGCCTTAATTG | TGG | + | AGGAGTT | AGG |
| | (Protein: | (SEQ | | CTTGGTTTGG | | | GCAAACG (SEQ ID | | | GCTCTAA | |
| | SEQ ID NO: | ID | | (SEQ ID | | | NO: 598) | | | TCGGTT | |
| | 316) | NO: | | NO: 597) | | | | | | SEQ ID | |
| | | 121) | | | | | | | | NO: 599) | |
| dTF5 | GRMZM2G124540 | 2701 | + | TTCTCTGCGC | TGG | + | GTGTGAGAAGCGG | AGG | − | GATTGGC | TGG |
| | (Protein: | (SEQ | | AAAAGATTCC | | | TAACTCG (SEQ ID | | | GTTTCGG | |
| | SEQ ID NO: | ID | | (SEQ ID | | | NO: 603) | | | GACGTC | |
| | 317) | NO: | | NO: 602) | | | | | | (SEQ ID | |
| | | 122) | | | | | | | | NO: 604) | |
| dTF6 | GRMZM2G021777 | 2206 | − | AGTCACGAGA | GGG | − | TATCTAACTTGTCA | TGG | − | AGACGGA | GGG |
| | (Protein: | (SEQ | | GAGATGCCAC | | | AGCTAT (SEQ ID | | | CGGTACG | |
| | SEQ ID NO: | ID | | (SEQ ID | | | NO: 608) | | | CCCCTG | |
| | 318) | NO: | | NO: 607) | | | | | | (SEQ ID | |
| | | 123) | | | | | | | | NO: 609) | |
| dTF7 | GRMZM2G073427 | 5651 | − | GGGAGCAGCC | TGG | − | ATATAATAGAGAT | AGG | − | AAATCAG | AGG |
| | (Protein: | (SEQ | | TGAGCAATGT | | | AATCCTA (SEQ ID | | | GACCTTA | |
| | SEQ ID NO: | ID | | (SEQ ID | | | NO: 613) | | | ACTTGA | |
| | 319) | NO: | | NO: 612) | | | | | | (SEQ ID | |
| | | 124) | | | | | | | | NO: 614) | |
| dTF8 | GRMZM2G380377 | 1767 | − | TGGTTCGATG | TGG | − | GCGCGGACTGACA | GGG | + | ACAAGCC | TGG |
| | (Protein: | (SEQ | | CGGAACGCGA | | | TGCGGCA (SEQ ID | | | GACGGAA | |
| | SEQ ID NO: | ID | | (SEQ ID | | | NO: 618) | | | AACCAG | |
| | 320) | NO: | | NO: 617) | | | | | | (SEQ ID | |
| | | 125) | | | | | | | | NO: 619) | |
| dTF9 | GRMZM2G351330 | 2018 | − | GTTCTTCCTAC | GGG | − | AGATATTCTTCGGC | GGG | + | AAGACGG | TGG |
| | (Protein: SEQ | (SEQ | | CAGCCGGCC | | | CCCGGT (SEQ ID | | | CAGACCA | |
| | ID NO: 321) | ID | | (SEQ ID | | | NO: 623) | | | CCCGAC | |
| | | NO: | | NO: 622) | | | | | | (SEQ ID | |
| | | 126) | | | | | | | | NO: 624) | |
| dTF10 | GRMZM2G105348 | 2109 | − | AATGGTGATG | AGG | + | GCGCCAGCACGAA | CGG | + | CAGGTAC | AGG |
| | (Protein: | (SEQ | | GGGCGCGGAA | | | TCGTATC (SEQ ID | | | ACTAAAC | |
| | SEQ ID NO: | ID | | (SEQ ID | | | NO: 628) | | | GCGAGA | |
| | 322) | NO: | | NO: 627) | | | | | | (SEQ ID | |
| | | 127) | | | | | | | | NO: 629) | |
| dTF11 | GRMZM2G137046 | 6138 | − | TGGGAACAAC | GGG | − | ATCCACACGGGTT | CGG | + | TTGTCGC | CGG |
| | (Protein: | (SEQ | | ACAGACCGTA | | | CGCCGTT (SEQ ID | | | GGAGCCA | |
| | SEQ ID NO: | ID | | (SEQ ID | | | NO: 633) | | | AAACCC | |
| | 323) | NO: | | NO: 632) | | | | | | (SEQ ID | |
| | | 128) | | | | | | | | NO: 634) | |
| dTF12 | GRMZM2G083472 | 3744 | − | AGCCGAGGAC | CGG | + | TGTAGGGAATTTA | TGG | − | ATTCCTT | TGG |
| | (Protein: | (SEQ | | CCCAAGAGAT | | | CCGTAAA (SEQ ID | | | CACTATT | |
| | SEQ ID NO: | ID | | (SEQ ID | | | NO: 638) | | | TAGAGC | |
| | 324) | NO: | | NO: 637) | | | | | | (SEQ ID | |
| | | 129) | | | | | | | | NO: 639) | |
| dTF13 | GRMZM2G018984 | 2636 | + | GTCATCCAGT | AGG | − | CATCTTCCCAACGC | GGG | + | TGTCGAG | AGG |
| | (Protein: | (SEQ | | AAGCTGCGCT | | | CCTGCC (SEQ ID | | | CACTAAA | |
| | SEQ ID NO: | ID | | (SEQ ID | | | NO: 643) | | | GGCAGG | |
| | 325) | NO: | | NO: 642) | | | | | | (SEQ ID | |
| | | 130) | | | | | | | | NO: 644) | |
| dTF14 | GRMZM2G150260 | 2644 | − | TCGCTCTTGAT | TGG | − | TTTATCTCCTCACC | CGG | − | GTGGTTT | AGG |
| | (Protein: | (SEQ | | CGTTGCAGC | | | TCTTCC (SEQ ID | | | ACGAGTA | |
| | SEQ ID NO: | ID | | (SEQ ID | | | NO: 648) | | | TTCGAA | |
| | 326) | NO: | | NO: 647) | | | | | | (SEQ ID | |
| | | 131) | | | | | | | | NO: 649) | |
| dTF15 | GRMZM2G470422 | 2436 | + | ACCAGCTCGA | TGG | + | ATCTCCATCATTCA | GGG | + | ATTAATT | TGG |
| | (Protein: | (SEQ | | TTAGCTCAGC | | | CCGAGA (SEQ ID | | | CTTTCCG | |
| | SEQ ID NO: | ID | | (SEQ ID | | | NO: 653) | | | CGCGTG | |
| | 327) | NO: | | NO: 652) | | | | | | (SEQ ID | |
| | | 132) | | | | | | | | NO: 654) | |
| dTF16 | GRMZM2G048582 | 5789 | + | GGAGCATCGA | GGG | − | GTTTGCAAACAGG | GGG | + | AACAGTT | TGG |
| | (Protein: | (SEQ | | GCCATTTCCG | | | AGGAACT (SEQ ID | | | GTCCCGG | |
| | SEQ ID NO: | ID | | (SEQ ID | | | NO: 658) | | | AATTTG | |
| | 328) | NO: | | NO: 657) | | | | | | (SEQ ID | |
| | | 133) | | | | | | | | NO: 659) | |
| dTF17 | GRMZM2G010871 | 3728 | + | CCGTGTTCCG | TGG | − | TTTTCTTTTTTGGC | AGG | − | GGGTCAT | TGG |
| | (Protein: | (SEQ | | TGCCACAATC | | | GCAAAC (SEQ ID | | | CAGTATT | |
| | SEQ ID NO: | ID | | (SEQ ID | | | NO: 663) | | | ATCTTT | |
| | 329) | NO: | | NO: 662) | | | | | | (SEQ ID | |
| | | 134) | | | | | | | | NO: 664) | |
| dTF18 | GRMZM2G405368 | 5305 | + | CATCGTAGTA | AGG | − | AGCTTGGTCGCAT | TGG | + | ATAAAAG | TGG |
| | (Protein: | (SEQ | | ACTGCCTCAT | | | TACGAAT (SEQ ID | | | GGTATAT | |
| | SEQ ID NO: | ID | | (SEQ ID | | | NO: 668) | | | GTTTAG | |
| | 330) | NO: | | NO: 667) | | | | | | (SEQ ID | |
| | | 135) | | | | | | | | NO: 669) | |
| dTF19 | GRMZM2G070034 | 2528 | + | ATGAGTTGCA | GGG | − | ATATATTGGTGATA | TGG | + | AAGACAT | AGG |
| | (Protein: | (SEQ | | GAATGTTTCT | | | AAGCAA (SEQ ID | | | GGAGCTC | |
| | SEQ ID NO: | ID | | (SEQ ID | | | NO: 673) | | | ATTAAG | |
| | 331) | NO: | | NO: 672) | | | | | | (SEQ ID | |
| | | 136) | | | | | | | | NO: 674) | |
| dTF20 | GRMZM2G441325 | 7046 | − | AACCAGCGAG | TGG | − | CAGCGTCACGCTC | AGG | + | GCTTGAT | GGG |
| | (Protein: | (SEQ | | GGAACGTTGA | | | CCGGGAA (SEQ ID | | | AAAGAAT | |
| | SEQ ID NO: | ID | | (SEQ ID | | | NO: 678) | | | CTCGTA | |
| | 332) | NO: | | NO: 677) | | | | | | (SEQ ID | |
| | | 137) | | | | | | | | NO: 679) | |
| dTF21 | GRMZM2G042895 | 2852 | + | TTCCCGCAGC | AGG | − | AATAGTATTGGCG | TGG | − | AATCCAT | TGG |
| | (Protein: | (SEQ | | GAGCATCAAA | | | TCTAACA (SEQ ID | | | ACAAGAG | |
| | SEQ ID NO: | ID | | (SEQ ID | | | NO: 683) | | | AGTCCA | |
| | 333) | NO: | | NO: 682) | | | | | | (SEQ ID | |
| | | 138) | | | | | | | | NO: 684) | |
| dTF22 | GRMZM2G017319 | 3237 | + | CATTAAACGT | AGG | + | TGAGCGCGCCAGG | TGG | − | GCGTGAC | CGG |
| | (Protein: | (SEQ | | ACGAGACTGC | | | TACGTGG (SEQ ID | | | GTACGCC | |
| | SEQ ID NO: | ID | | (SEQ ID | | | NO: 687) | | | GCGGAA | |
| | 334) | NO: | | NO: 555) | | | | | | (SEQ ID | |
| | | 28) | | | | | | | | NO: 688) | |
| dTF59⁴ | GRMZM2G089501 | 8185 | − | CGCAATTCTCT | TGG | + | TCGTTACCGCAAAC | CGG | + | CGGAGGG | CGG |
| | (Protein: | (SEQ | | TGGGCCGGT | | | GTTGTA (SEQ ID | | | GACGCAT | |
| | SEQ ID NO: | ID | | (SEQ ID | | | NO: 690) | | | TGCGTA | |
| | 388) | NO: | | NO: 689) | | | | | | (SEQ ID | |
| | | 139) | | | | | | | | NO: 691) | |
| dTF60 | GRMZM2G000520 | 2574 | − | GCAGACGCGT | GGG | + | TATGCTAATATCCC | TGG | − | TACGCAT | TGG |
| | (Protein: | (SEQ | | AAATCCGAGC | | | CCGTTT (SEQ ID | | | GTCTAGT | |
| | SEQ ID NO: | ID | | (SEQ ID | | | NO: 695) | | | AACGCA | |
| | 389) | NO: | | NO: 694) | | | | | | (SEQ ID | |
| | | 140) | | | | | | | | NO: 696) | |

| | | | Guide target #4 | | | Guide target #5 | | |
|---|---|---|---|---|---|---|---|---|
| | | | | Guide | | | Guide | |
| | | | | target | | | target | |
| | | Sequence | | sequence | | | sequence | |
| | Maize | size¹, | | (5′ to | | | (5′ to | |
| Gene | ortholog | bp | Strand | 3′) | PAM | Strand | 3′) | PAM |
| dTF1 | GRMZM2G049378 | 1450 | − | GTTGTGAGACGAA | TGG | − | GCTCCCT | GGG |
| | (Protein: | (SEQ | | GAGCTCC (SEQ | | | GCGTGTT | |
| | SEQ ID NO: | ID | | ID NO: 585) | | | GTAGTT | |
| | 313) | NO: | | | | | (SEQ ID | |
| | | 118) | | | | | NO: 586) | |
| dTF2 | GRMZM2G158117 | 2083 | + | CTTCAAATATGTCT | CGG | + | AGTACAA | TGG |
| | (Protein: SEQ | (SEQ | | GCCTCG (SEQ ID | | | GACACAG | |
| | ID NO: 314) | ID | | NO: 590) | | | GGATTC | |
| | | NO: | | | | | (SEQ ID | |
| | | 119) | | | | | NO: 591) | |
| dTF3 | Zm00001d017782 | 1392 | + | ACCGCTGGCACAA | CGG | + | GCAGCAG | AGG |
| | (Protein: | (SEQ | | CGTTGCG (SEQ | | | CAGTTCT | |
| | SEQ ID NO: | ID | | ID NO: 595) | | | TGGGGC | |
| | 315) | NO: | | | | | (SEQ ID | |
| | | 120) | | | | | NO: 596) | |
| dTF4 | GRMZM2G007063 | 4472 | − | ACGCGCTCCATTCC | AGG | − | AGGTCGA | GGG |
| | (Protein: | (SEQ | | GGATCG (SEQ ID | | | GCCGGAT | |
| | SEQ ID NO: | ID | | NO: 600) | | | GAAGCC | |
| | 316) | NO: | | | | | (SEQ ID | |
| | | 121) | | | | | NO: 601) | |
| dTF5 | GRMZM2G124540 | 2701 | − | CGAGGTCCAGACC | AGG | − | GCCGACG | CGG |
| | (Protein: | (SEQ | | CAGATCC (SEQ | | | GTGGCCG | |
| | SEQ ID NO: | ID | | ID NO: 605) | | | CTACAC | |
| | 317) | NO: | | | | | (SEQ ID | |
| | | 122) | | | | | NO: 606) | |
| dTF6 | GRMZM2G021777 | 2206 | + | AGAAGCCGGCGGC | TGG | + | GGGCGTG | GGG |
| | (Protein: | (SEQ | | GGGGTAC (SEQ | | | CTTCTCG | |
| | SEQ ID NO: | ID | | ID NO: 610) | | | CCCACG | |
| | 318) | NO: | | | | | (SEQ ID | |
| | | 123) | | | | | NO: 611) | |
| dTF7 | GRMZM2G073427 | 5651 | − | AGCACCGCGGCGT | GGG | − | GAATGTC | CGG |
| | (Protein: | (SEQ | | ATGCGCC (SEQ | | | GTTGACG | |
| | SEQ ID NO: | ID | | ID NO: 615) | | | CGGTCT | |
| | 319) | NO: | | | | | (SEQ ID | |
| | | 124) | | | | | NO: 616) | |
| dTF8 | GRMZM2G380377 | 1767 | + | TCGGCTACGGCTA | GGG | − | CACGATG | CGG |
| | (Protein: | (SEQ | | CGGGTAC (SEQ | | | CTATGCC | |
| | SEQ ID NO: | ID | | ID NO: 620) | | | ATCCGC | |
| | 320) | NO: | | | | | (SEQ ID | |
| | | 125) | | | | | NO: 621) | |
| dTF9 | GRMZM2G351330 | 2018 | − | CCCGCCAAAAACG | CGG | − | GGCATGG | CGG |
| | (Protein: SEQ | (SEQ | | AGGACGG (SEQ | | | CGCAGTA | |
| | ID NO: 321) | ID | | ID NO: 625) | | | GGACTC | |
| | | NO: | | | | | (SEQ ID | |
| | | 126) | | | | | NO: 626) | |
| dTF10 | GRMZM2G105348 | 2109 | + | CGTGGCCAAGACG | TGG | + | AGGACGG | AGG |
| | (Protein: | (SEQ | | TACCGCA (SEQ | | | CGCGAGC | |
| | SEQ ID NO: | ID | | ID NO: 630) | | | ATCAAG | |
| | 322) | NO: | | | | | (SEQ ID | |
| | | 127) | | | | | NO: 631) | |
| dTF11 | GRMZM2G137046 | 6138 | − | CTCCATGTCCACGT | CGG | + | GCTGTAA | AGG |
| | (Protein: | (SEQ | | GGTGCC (SEQ | | | ACAGAAG | |
| | SEQ ID NO: | ID | | ID NO: 635) | | | AGGTTC | |
| | 323) | NO: | | | | | (SEQ ID | |
| | | 128) | | | | | NO: 636) | |
| dTF12 | GRMZM2G083472 | 3744 | − | GATGCGAGACGTG | GGG | − | CACAATT | TGG |
| | (Protein: | (SEQ | | AGACTGT (SEQ | | | GTATACC | |
| | SEQ ID NO: | ID | | ID NO: 640) | | | TGCAGA | |
| | 324) | NO: | | | | | (SEQ ID | |
| | | 129) | | | | | NO: 641) | |
| dTF13 | GRMZM2G018984 | 2636 | + | GCGTCGAAGCCGG | AGG | + | CTGCAGA | TGG |
| | (Protein: | (SEQ | | TGACAGA (SEQ | | | TGCCCTA | |
| | SEQ ID NO: | ID | | ID NO: 645) | | | CTCGGG | |
| | 325) | NO: | | | | | (SEQ ID | |
| | | 130) | | | | | NO: 646) | |
| dTF14 | GRMZM2G150260 | 2644 | − | GTCCGCCGACTTG | CGG | − | TCGGCGT | GGG |
| | (Protein: | (SEQ | | CCACCCA (SEQ | | | CGTCGTA | |
| | SEQ ID NO: | ID | | ID NO: 650) | | | GCCGCC | |
| | 326) | NO: | | | | | (SEQ ID | |
| | | 131) | | | | | NO: 651) | |
| dTF15 | GRMZM2G470422 | 2436 | + | CGCGAGCCGACCC | GGG | + | GACGAGG | TGG |
| | (Protein: | (SEQ | | AAGCCGG (SEQ | | | GTCGCTC | |
| | SEQ ID NO: | ID | | ID NO: 655) | | | TCACCC | |
| | 327) | NO: | | | | | (SEQ ID | |
| | | 132) | | | | | NO: 656) | |
| dTF16 | GRMZM2G048582 | 5789 | − | GTGCGTGCCACGG | CGG | + | CCAGCTA | TGG |
| | (Protein: | (SEQ | | AGATGCT (SEQ | | | CAAGGGT | |
| | SEQ ID NO: | ID | | ID NO: 660) | | | CACAGC | |
| | 328) | NO: | | | | | (SEQ ID | |
| | | 133) | | | | | NO: 661) | |
| dTF17 | GRMZM2G010871 | 3728 | − | CCCACACCGTCCTG | CGG | + | ACACACC | GGG |
| | (Protein: | (SEQ | | CGTCGG (SEQ | | | ATTCTAC | |
| | SEQ ID NO: | ID | | ID NO: 665) | | | AGTGAT | |
| | 329) | NO: | | | | | (SEQ ID | |
| | | 134) | | | | | NO: 666) | |
| dTF18 | GRMZM2G405368 | 5305 | − | AATTGCTGATGAT | TGG | + | CGCGAAA | TGG |
| | (Protein: | (SEQ | | ACTAGTC (SEQ | | | AGAGTCT | |
| | SEQ ID NO: | ID | | ID NO: 670) | | | CTGATA | |
| | 330) | NO: | | | | | (SEQ ID | |
| | | 135) | | | | | NO: 671) | |
| dTF19 | GRMZM2G070034 | 2528 | + | CATTGAAGAACTG | TGG | + | GTACATA | GGG |
| | (Protein: | (SEQ | | CATAATC (SEQ | | | GGATTAC | |
| | SEQ ID NO: | ID | | ID NO: 675) | | | CCGGCA | |
| | 331) | NO: | | | | | (SEQ ID | |
| | | 136) | | | | | NO: 676) | |
| dTF20 | GRMZM2G441325 | 7046 | + | GCGCGGTGTGCGC | TGG | + | GAAAGAA | TGG |
| | (Protein: | (SEQ | | GGAGCTG (SEQ | | | GGGCAAT | |
| | SEQ ID NO: | ID | | ID NO: 680) | | | ACGAAG | |
| | 332) | NO: | | | | | (SEQ ID | |
| | | 137) | | | | | NO: 681) | |
| dTF21 | GRMZM2G042895 | 2852 | − | GCTGGAGTCGTAG | GGG | − | TGATCTG | TGG |
| | (Protein: | (SEQ | | CAGGACA (SEQ | | | GATACGA | |
| | SEQ ID NO: | ID | | ID NO: 685) | | | TTCGTC | |
| | 333) | NO: | | | | | (SEQ ID | |
| | | 138) | | | | | NO: 686) | |
| dTF22 | GRMZM2G017319 | 3237 | − | CGTGGATCCAGTC | GGG | + | GAGGACC | CGG |
| | (Protein: | (SEQ | | GATGCTG (SEQ | | | AGACCGG | |
| | SEQ ID NO: | ID | | ID NO: 576) | | | TGATCA | |
| | 334) | NO: | | | | | (SEQ ID | |
| | | 28) | | | | | NO: 577) | |
| dTF59⁴ | GRMZM2G089501 | 8185 | − | GCGCCTTGGAGTC | AGG | + | CGGCATC | GGG |
| | (Protein: | (SEQ | | GTGTAGC (SEQ | | | TAGCAAC | |
| | SEQ ID NO: | ID | | ID NO: 692) | | | GAATTA | |
| | 388) | NO: | | | | | (SEQ ID | |
| | | 139) | | | | | NO: 693) | |
| dTF60 | GRMZM2G000520 | 2574 | − | CTGAAGCCGAACC | CGG | − | ACGGGTC | AGG |
| | (Protein: | (SEQ | | AGCCTGG (SEQ | | | ATGGTAG | |
| | SEQ ID NO: | ID | | ID NO: 697) | | | CTCCAG | |
| | 389) | NO: | | | | | (SEQ ID | |
| | | 140) | | | | | NO: 698) | |

Five guide target sequences were designed for each gene target as described in FIG. 7.
¹DNA sequence includes the 5′ UTR region upstream of the ATG (predicted at MaizeGDB (Andorf et al., 2016, Nucleic Acids Res., doi: 10.1093/nar/gkv1007), GenBank, and/or transcript analysis), 1000 bp of promoter sequence upstream of the 5′ UTR, and the coding sequence of the gene including any introns.
²Strand (+/−) refers to the gRNA binding to either the forward strand of DNA (+) or its reverse complement (−).
³PAM refers to the protospacer adjacent motif for the CAS9 enzyme that resides directly adjacent to the 3′ end of the guide RNA target.
⁴For dTF59, the gene has multiple Exons and the first Exon of the gene typically used for design of Guide target sequence #4 (FIG. 7) is very short. Thus the second exon was used to design guide target sequence #4 for dTF59.

### Example 6. Identification of Orthologs of Other dTFs in Major Crops

[0300] Orthologs of each switchgrass dTF gene were found in major crops by reciprocal BLAST searches as described above. The hits were ranked in order of the alignment score and the top hit was identified as the best ortholog. The orthologs for corn, soybean, canola, rice, Medicago truncatula (a close relative of alfalfa), sorghum, and wheat are shown in Tables 8 and 10-14. The coding sequence of the camelina ortholog of dTF22 is shown in Table 15. The genome sequence for alfalfa (Medicago sativa) is not publically available. The sequence of a close relative to alfalfa, Medicago truncatula was used to find the dTF22 ortholog. Once the genome sequence of alfalfa (Medicago sativa) is publically available, the dTF22 ortholog can be found by comparison with the Medicago truncatula and switchgrass genes.

[0301] Guide target sequences to produce sgRNAs (FIG. 6) can be designed for CRISPR/Cas9 editing of each gene or promoter sequence as described above and as detailed in FIG. 7. The Gene IDs listed in Tables 10-15 can be used to download the sequence of the promoter in front of each gene, using a database such as Phytozome, if the promoter sequence is the target for editing. When designing sgRNAs for editing, the genomic sequence for each gene can be downloaded to locate any introns that might affect the choice of design of sgRNAs.

[0302] Editing of the dTF can be achieved through Agrobacterium mediated transformation, protoplast transformation, transformation of explants with the gene gun, or delivery or through the use of RNPs as previously described above.

TABLE 10
Orthologs of dTFs in corn¹

| | |
|---|---|
| Switchgrass | Corn |

| dTF | Gene | SEQ ID |
|---|---|---|
| 1 | GRMZM2G049378 | Gene: SEQ ID NO: 35 |
| | | Protein: SEQ ID NO: 313 |
| 2 | GRMZM2G158117 | Gene: SEQ ID NO: 36 |
| | | Protein: SEQ ID NO: 314 |
| 3 | Zm00001d017782 | Gene: SEQ ID NO: 37 |
| | | Protein: SEQ ID NO: 315 |
| 4 | GRMZM2G007063 | Gene: SEQ ID NO: 38 |
| | | Protein: SEQ ID NO: 316 |
| 5 | GRMZM2G124540 | Gene: SEQ ID NO: 39 |
| | | Protein: SEQ ID NO: 317 |
| 6 | GRMZM2G021777 | Gene: SEQ ID NO: 40 |
| | | Protein: SEQ ID NO: 318 |
| 7 | GRMZM2G073427 | Gene: SEQ ID NO: 41 |
| | | Protein: SEQ ID NO: 319 |
| 8 | GRMZM2G380377 | Gene: SEQ ID NO: 42 |
| | | Protein: SEQ ID NO: 320 |
| 9 | GRMZM2G351330 | Gene: SEQ ID NO: 43 |
| | | Protein: SEQ ID NO: 321 |
| 10 | GRMZM2G105348 | Gene: SEQ ID NO: 44 |
| | | Protein: SEQ ID NO: 322 |
| 11 | GRMZM2G137046 | Gene: SEQ ID NO: 45 |
| | | Protein: SEQ ID NO: 323 |
| 12 | GRMZM2G083472 | Gene: SEQ ID NO: 46 |
| | | Protein: SEQ ID NO: 324 |
| 13 | GRMZM2G018984 | Gene: SEQ ID NO: 47 |
| | | Protein: SEQ ID NO: 325 |
| 14 | GRMZM2G150260 | Gene: SEQ ID NO: 48 |
| | | Protein: SEQ ID NO: 326 |
| 15 | GRMZM2G470422 | Gene: SEQ ID NO: 49 |
| | | Protein: SEQ ID NO: 327 |
| 16 | GRMZM2G048582 | Gene: SEQ ID NO: 50 |
| | | Protein: SEQ ID NO: 328 |
| 17 | GRMZM2G010871 | Gene: SEQ ID NO: 51 |
| | | Protein: SEQ ID NO: 329 |
| 18 | GRMZM2G405368 | Gene: SEQ ID NO: 52 |
| | | Protein: SEQ ID NO: 330 |
| 19 | GRMZM2G070034 | Gene: SEQ ID NO: 53 |
| | | Protein: SEQ ID NO: 331 |
| 20 | GRMZM2G441325 | Gene: SEQ ID NO: 54 |
| | | Protein: SEQ ID NO: 332 |
| 21 | GRMZM2G042895 | Gene: SEQ ID NO: 55 |
| | | Protein: SEQ ID NO: 333 |
| 22 | GRMZM2G017319 | Gene: SEQ ID NO: 56 |
| | | Protein: SEQ ID NO: 334 |
| 59 | GRMZM2G089501 | Gene: SEQ ID NO: 110 |
| | | Protein: SEQ ID NO: 388 |
| 60 | GRMZM2G000520 | Gene: SEQ ID NO: 111 |
| | | Protein: SEQ ID NO: 389 |

Sequence deposited under SEQ ID contains only the coding sequence of the gene.

TABLE 11
Soybean orthologs and homologs of switchgrass downregulated downstream transcription factor genes¹

| Switchgrass | Ortholog | | Homolog | |
|---|---|---|---|---|
| dTF | Gene | SEQ ID | Gene | SEQ ID |
| 1 | Glyma.12G042900 | Gene: SEQ ID NO: 141 | Glyma.11G117200.1 | Gene: SEQ ID NO: 142 |
| | | Protein: SEQ ID NO: 396 | | Protein: SEQ ID NO: 397 |
| 2 | Glyma.11G117200 | Gene: SEQ ID NO: 142 | Glyma.12G042900.1 | Gene: SEQ ID NO: 141 |
| | | Protein: SEQ ID NO: 397 | | Protein: SEQ ID NO: 396 |
| 3 | Glyma.14G074500 | Gene: SEQ ID NO: 143 | Glyma.11G069100.1 | Gene: SEQ ID NO: 722 |
| | | Protein: SEQ ID NO: 398 | | Protein: SEQ ID NO: 742 |
| 4 | Glyma.10G162100 | Gene: SEQ ID NO: 144 | Glyma.03G247100.1 | Gene: SEQ ID NO: 723 |
| | | Protein: SEQ ID NO: 399 | | Protein: SEQ ID NO: 743 |
| 5 | Glyma.11G058600 | Gene: SEQ ID NO: 145 | Glyma.01G183700.1 | Gene: SEQ ID NO: 724 |
| | | Protein: SEQ ID NO: 400 | | Protein: SEQ ID NO: 744 |
| 6 | Glyma.13G093800 | Gene: SEQ ID NO: 146 | Glyma.17G066600.1 | Gene: SEQ ID NO: 725 |
| | | Protein: SEQ ID NO: 401 | | Protein: SEQ ID NO: 745 |
| 7 | Glyma.10G162100 | Gene: SEQ ID NO: 144 | Glyma.20G224500.1 | Gene: SEQ ID NO: 726 |
| | | Protein: SEQ ID NO: 399 | | Protein: SEQ ID NO: 746 |
| 8 | Glyma.10G239400 | Gene: SEQ ID NO: 148 | Glyma.20G155100.1 | Gene: SEQ ID NO: 727 |
| | | Protein: SEQ ID NO: 403 | | Protein: SEQ ID NO: 747 |
| 9 | Glyma.16G021000 | Gene: SEQ ID NO: 149 | Glyma.07G052100.1 | Gene: SEQ ID NO: 728 |
| | | Protein: SEQ ID NO: 404 | | Protein: SEQ ID NO: 748 |
| 10 | Glyma.09G190600 | Gene: SEQ ID NO: 150 | Glyma.16G091800.1 | Gene: SEQ ID NO: 729 |
| | | Protein: SEQ ID NO: 405 | | Protein: SEQ ID NO: 749 |
| 11 | Glyma.18G117100 | Gene: SEQ ID NO: 151 | Glyma.08G302500.1 | Gene: SEQ ID NO: 730 |
| | | Protein: SEQ ID NO: 406 | | Protein: SEQ ID NO: 750 |
| 12 | Glyma.15G123100 | Gene: SEQ ID NO: 152 | Glyma.03G166400.1 | Gene: SEQ ID NO: 731 |
| | | Protein: SEQ ID NO: 407 | | Protein: SEQ ID NO: 751 |
| 13 | Glyma.03G263700 | Gene: SEQ ID NO: 153 | Glyma.16G012600.4 | Gene: SEQ ID NO: 732 |
| | | Protein: SEQ ID NO: 408 | | Protein: SEQ ID |
| 14 | Glyma.12G042900 | Gene: SEQ ID NO: 141 | Glyma.11G117200.1 | Gene: SEQ ID NO: 142 |
| | | Protein: SEQ ID NO: 396 | | Protein: SEQ ID NO: 397 |
| | | | Glyma.04G012600.1 | Gene: SEQ ID NO: 733 |
| | | | | Protein: SEQ ID NO: 753 |
| 15 | Glyma.10G215200 | Gene: SEQ ID NO: 155 | Glyma.20G176500.1 | Gene: SEQ ID NO: 734 |
| | | Protein: SEQ ID NO: 410 | | Protein: SEQ ID NO: 754 |
| 16 | Glyma.06G017800 | Gene: SEQ ID NO: 156 | Glyma.04G017400.9 | Gene: SEQ ID NO: 735 |
| | | Protein: SEQ ID NO: 411 | | Protein: SEQ ID NO: 755 |
| 17 | Glyma.19G159500 | Gene: SEQ ID NO: 157 | Glyma.03G157300.2 | Gene: SEQ ID NO: 736 |
| | | Protein: SEQ ID NO: 412 | | Protein: SEQ ID NO: 756 |
| 18 | Glyma.08G255200 | Gene: SEQ ID NO: 158 | Glyma.18G278100.1 | Gene: SEQ ID NO: 737 |
| | | Protein: SEQ ID NO: 413 | | Protein: SEQ ID NO: 757 |
| 19 | Glyma.09G266200 | Gene: SEQ ID NO: 159 | Glyma.18G224500.2 | Gene: SEQ ID NO: 738 |
| | | Protein: SEQ ID NO: 414 | | Protein: SEQ ID NO: 758 |
| 20 | Glyma.15G078800 | Gene: SEQ ID NO: 160 | Glyma.13G234200.1 | Gene: SEQ ID NO: 739 |
| | | Protein: SEQ ID NO: 415 | | Protein: SEQ ID NO: 759 |
| 21 | Glyma.09G060200 | Gene: SEQ ID NO: 161 | Glyma.17G058600.1 | Gene: SEQ ID NO: 740 |
| | | Protein: SEQ ID NO: 416 | | Protein: SEQ ID NO: 760 |
| 22 | Glyma05g22120 | Gene: SEQ ID NO: 162 | Glyma.05G103300.1 | Gene: SEQ ID NO: 741 |
| | | Protein: SEQ ID NO: 417 | | Protein: SEQ ID NO: 761 |
| 59 | Glyma.02G123400 | Gene: SEQ ID NO: 163 | Glyma.01G066600.1 | Gene: SEQ ID NO: 147 |
| | | Protein: SEQ ID NO: 418 | | Protein: SEQ ID NO: 402 |
| 60 | Glyma.19G192400 | Gene: SEQ ID NO: 164 | Glyma.05G049800.1 | Gene: SEQ ID NO: 154 |
| | | Protein: 419 | | Protein: SEQ ID NO: 409 |

Sequence deposited under SEQ ID contains only the coding sequence of the gene.

TABLE 12
Orthologs of dTFs in canola and rice¹

| | |
|---|---|
| Switchgrass | Canola |

| dTF | Gene | SEQ ID |
|---|---|---|
| 1 | BnaC03g76670D | Gene: SEQ ID NO: 165 |
| | | Protein: SEQ ID NO: 420 |
| 2 | BnaC01g02200D | Gene: SEQ ID NO: 166 |
| | | Protein: SEQ ID NO: 421 |
| 3 | BnaA06g13720D | Gene: SEQ ID NO: 167 |
| | | Protein: SEQ ID NO: 422 |
| 4 | BnaA02g17180D | Gene: SEQ ID NO: 168 |
| | | Protein: SEQ ID NO: 423 |
| 5 | BnaC07g11890D | Gene: SEQ ID NO: 169 |
| | | Protein: SEQ ID NO: 424 |
| 6 | BnaA04g14640D | Gene: SEQ ID NO: 170 |
| | | Protein: SEQ ID NO: 425 |
| 7 | BnaA06g29270D | Gene: SEQ ID NO: 171 |
| | | Protein: SEQ ID NO: 426 |
| 8 | BnaC04g08850D | Gene: SEQ ID NO: 172 |
| | | Protein: SEQ ID NO: 427 |
| 9 | BnaA07g24100D | Gene: SEQ ID NO: 173 |
| | | Protein: SEQ ID NO: 428 |
| 10 | BnaC03g43990D | Gene: SEQ ID NO: 174 |
| | | Protein: SEQ ID NO: 429 |
| 11 | BnaCnng20200D | Gene: SEQ ID NO: 175 |
| | | Protein: SEQ ID NO: 430 |
| 12 | BnaA01g30110D | Gene: SEQ ID NO: 176 |
| | | Protein: SEQ ID NO: 431 |
| 13 | BnaA05g23130D | Gene: SEQ ID NO: 177 |
| | | Protein: SEQ ID NO: 432 |
| 14 | BnaC06g36010D | Gene: SEQ ID NO: 178 |
| | | Protein: SEQ ID NO: 433 |
| 15 | BnaC06g08250D | Gene: SEQ ID NO: 179 |
| | | Protein: SEQ ID NO: 434 |
| 16 | BnaC08g19370D | Gene: SEQ ID NO: 180 |
| | | Protein: SEQ ID NO: 435 |
| 17 | BnaA02g03270D | Gene: SEQ ID NO: 181 |
| | | Protein: SEQ ID NO: 436 |
| 18 | BnaA10g18420D | Gene: SEQ ID NO: 182 |
| | | Protein: SEQ ID NO: 437 |
| 19 | BnaA04g26320D | Gene: SEQ ID NO: 183 |
| | | Protein: SEQ ID NO: 438 |
| 20 | BnaA03g46370D | Gene: SEQ ID NO: 184 |
| | | Protein: SEQ ID NO: 439 |
| 21 | BnaA10g11180D | Gene: SEQ ID NO: 185 |
| | | Protein: SEQ ID NO: 440 |
| 22 | BnaC02g16720D | Gene: SEQ ID NO: 186 |
| | | Protein: SEQ ID NO: 441 |
| 59 | BnaA10g23230D | Gene: SEQ ID NO: 187 |
| | | Protein: SEQ ID NO: 442 |
| 60 | BnaC09g28200D | Gene: SEQ ID NO: 188 |
| | | Protein: SEQ ID NO: 443 |

| Switchgrass | Rice | |
|---|---|---|
| dTF | Gene | SEQ ID |
| 1 | LOC_Os01g47370.1 | Gene: SEQ ID NO: 189 |
| | | Protein: SEQ ID NO: 444 |
| 2 | LOC_Os05g49240.1 | Gene: SEQ ID NO: 190 |
| | | Protein: SEQ ID NO: 445 |
| 3 | LOC_Os02g47744.4 | Gene: SEQ ID NO: 191 |
| | | Protein: SEQ ID NO: 446 |
| 4 | LOC_Os03g58250.1 | Gene: SEQ ID NO: 192 |
| | | Protein: SEQ ID NO: 447 |
| 5 | LOC_Os03g55590.1 | Gene: SEQ ID NO: 193 |
| | | Protein: SEQ ID NO: 448 |
| 6 | LOC_Os02g39710.1 | Gene: SEQ ID NO: 194 |
| | | Protein: SEQ ID NO: 449 |
| 7 | LOC_Os12g40920.1 | Gene: SEQ ID NO: 195 |
| | | Protein: SEQ ID NO: 450 |
| 8 | LOC_Os06g03670.1 | Gene: SEQ ID NO: 196 |
| | | Protein: SEQ ID NO: 451 |
| 9 | LOC_Os04g45810.1 | Gene: SEQ ID NO: 197 |
| | | Protein: SEQ ID NO: 452 |
| 10 | LOC_Os02g13800.1 | Gene: SEQ ID NO: 198 |
| | | Protein: SEQ ID NO: 453 |
| 11 | LOC_Os02g10860.1 | Gene: SEQ ID NO: 199 |
| | | Protein: SEQ ID NO: 454 |
| 12 | LOC_Os06g49040.1 | Gene: SEQ ID NO: 200 |
| | | Protein: SEQ ID NO: 455 |
| 13 | LOC_Os03g08470.3 | Gene: SEQ ID NO: 201 |
| | | Protein: SEQ ID NO: 456 |
| 14 | LOC_Os05g50340.1 | Gene: SEQ ID NO: 202 |
| | | Protein: SEQ ID NO: 457 |
| 15 | LOC_Os03g62230.1 | Gene: SEQ ID NO: 203 |
| | | Protein: SEQ ID NO: 458 |
| 16 | LOC_Os09g37710.2 | Gene: SEQ ID NO: 204 |
| | | Protein: SEQ ID NO: 459 |
| 17 | LOC_Os10g28340.5 | Gene: SEQ ID NO: 205 |
| | | Protein: SEQ ID NO: 460 |
| 18 | LOC_Os06g16370.1 | Gene: SEQ ID NO: 206 |
| | | Protein: SEQ ID NO: 461 |
| 19 | LOC_Os10g39130.1 | Gene: SEQ ID NO: 207 |
| | | Protein: SEQ ID NO: 462 |
| 20 | LOC_Os05g43920.1 | Gene: SEQ ID NO: 208 |
| | | Protein: SEQ ID NO: 463 |
| 21 | LOC_Os04g23550.1 | Gene: SEQ ID NO: 209 |
| | | Protein: SEQ ID NO: 464 |
| 22 | LOC_Os03g41330.1 | Gene: SEQ ID NO: 210 |
| | | Protein: SEQ ID NO: 465 |
| 59 | LOC_Os08g38210.1 | Gene: SEQ ID NO: 211 |
| | | Protein: SEQ ID NO: 466 |
| 60 | LOC_Os02g45420.1 | Gene: SEQ ID NO: 212 |
| | | Protein: SEQ ID NO: 467 |

Sequence deposited under SEQ ID contains only the coding sequence of the gene.

TABLE 13
Orthologs of dTFs in Medicago truncatula and sorghum¹

| Switchgrass | Medicago truncatula² | | Sorghum | |
|---|---|---|---|---|
| dTF | Gene | SEQ ID | Gene | SEQ ID |
| 1 | Medtr3g116720 | Gene: SEQ ID NO: 213 | Sb03g030330 | Gene: SEQ ID NO: 237 |
| | | Protein: SEQ ID NO: 468 | | Protein: SEQ ID NO: 492 |
| 2 | Medtr3g111880 | Gene: SEQ ID NO: 214 | Sb09g028790 | Gene: SEQ ID NO: 238 |
| | | Protein: SEQ ID NO: 469 | | Protein: SEQ ID NO: 493 |
| 3 | Medtr1g022290 | Gene: SEQ ID NO: 215 | Sb04g030510 | Gene: SEQ ID NO: 239 |
| | | Protein: SEQ ID NO: 470 | | Protein: SEQ ID NO: 494 |
| 4 | Medtr1g080920 | Gene: SEQ ID NO: 216 | Sb02g004610 | Gene: SEQ ID NO: 240 |
| | | Protein: SEQ ID NO: 471 | | Protein: SEQ ID NO: 495 |
| 5 | Medtr4g086835 | Gene: SEQ ID NO: 217 | Sb01g007130 | Gene: SEQ ID NO: 241 |
| | | Protein: SEQ ID NO: 472 | | Protein: SEQ ID NO: 496 |
| 6 | Medtr3g105710 | Gene: SEQ ID NO: 218 | Sb04g025660 | Gene: SEQ ID NO: 242 |
| | | Protein: SEQ ID NO: 473 | | Protein: SEQ ID NO: 497 |
| 7 | Medtr1g080920 | Gene: SEQ ID NO: 216 | Sb08g020600 | Gene: SEQ ID NO: 243 |
| | | Protein: SEQ ID NO: 471 | | Protein: SEQ ID NO: 498 |
| 8 | Medtr6g465530 | Gene: SEQ ID NO: 220 | Sb10g001620 | Gene: SEQ ID NO: 244 |
| | | Protein: SEQ ID NO: 475 | | Protein: SEQ ID NO: 499 |
| 9 | Medtr8g026960 | Gene: SEQ ID NO: 221 | Sb06g024000 | Gene: SEQ ID NO: 245 |
| | | Protein: SEQ ID NO: 476 | | Protein: SEQ ID NO: 500 |
| 10 | Medtr6g086805 | Gene: SEQ ID NO: 222 | Sb04g008300 | Gene: SEQ ID NO: 246 |
| | | Protein: SEQ ID NO: 477 | | Protein: SEQ ID NO: 501 |
| 11 | Medtr3g436010 | Gene: SEQ ID NO: 223 | Sb04g007060 | Gene: SEQ ID NO: 247 |
| | | Protein: SEQ ID NO: 478 | | Protein: SEQ ID NO: 502 |
| 12 | Medtr7g088070 | Gene: SEQ ID NO: 224 | Sb10g029200 | Gene: SEQ ID NO: 248 |
| | | Protein: SEQ ID NO: 479 | | Protein: SEQ ID NO: 503 |
| 13 | Medtr8g022820 | Gene: SEQ ID NO: 225 | Sb01g045060 | Gene: SEQ ID NO: 249 |
| | | Protein: SEQ ID NO: 480 | | |
| | Medtr2g105380.1 | Gene: SEQ ID NO: 762 | | Protein: SEQ ID NO: 504 |
| | | Protein: SEQ ID NO: 763 | | |
| 14 | Medtr1g022290 | Gene: SEQ ID NO: 215 | Sb03g028960 | Gene: SEQ ID NO: 250 |
| | | Protein: SEQ ID NO: 470 | | Protein: SEQ ID NO: 505 |
| 15 | Medtr1g093095 | Gene: SEQ ID NO: 227 | Sb03g041170 | Gene: SEQ ID NO: 251 |
| | | Protein: SEQ ID NO: 482 | | Protein: SEQ ID NO: 506 |
| 16 | Medtr3g115400 | Gene: SEQ ID NO: 228 | Sb02g031970 | Gene: SEQ ID NO: 252 |
| | | Protein: SEQ ID NO: 483 | | Protein: SEQ ID NO: 507 |
| 17 | Medtr7g095680 | Gene: SEQ ID NO: 229 | Sb01g021490 | Gene: SEQ ID NO: 253 |
| | | Protein: SEQ ID NO: 484 | | Protein: SEQ ID NO: 508 |
| 18 | Medtr7g018170 | Gene: SEQ ID NO: 230 | Sb10g100050 | Gene: SEQ ID NO: 254 |
| | | Protein: SEQ ID NO: 485 | | Protein: SEQ ID NO: 509 |
| 19 | Medtr8g033220 | Gene: SEQ ID NO: 231 | Sb01g030570 | Gene: SEQ ID NO: 255 |
| | | Protein: SEQ ID NO: 486 | | Protein: SEQ ID NO: 510 |
| 20 | Medtr2g014770 | Gene: SEQ ID NO: 232 | Sb09g025500 | Gene: SEQ ID NO: 256 |
| | | Protein: SEQ ID NO: 487 | | Protein: SEQ ID NO: 511 |
| 21 | Medtr2g038040 | Gene: SEQ ID NO: 233 | Sb04g017390 | Gene: SEQ ID NO: 257 |
| | | Protein: SEQ ID NO: 488 | | Protein: SEQ ID NO: 512 |
| 22 | Medtr1g106420 | Gene: SEQ ID NO: 234 | Sb01g014800 | Gene: SEQ ID NO: 258 |
| | | Protein: SEQ ID NO: 489 | | Protein: SEQ ID NO: 513 |
| 59 | Medtr4g110040 | Gene: SEQ ID NO: 235 | Sb07g028860 | Gene: SEQ ID NO: 259 |
| | | Protein: SEQ ID NO: 490 | | Protein: SEQ ID NO: 514 |
| 60 | Medtr4g102670 | Gene: SEQ ID NO: 236 | Sb06g025890 | Gene: SEQ ID NO: 260 |
| | | Protein: SEQ ID NO: 491 | | Protein: SEQ ID NO: 515 |

Sequence deposited under SEQ ID contains only the coding sequence of the gene.
²The genome sequence for alfalfa (Medicago sativa) is not publically available. The sequence of a close relative to alfalfa, Medicago truncatula was used to find the dTF22 ortholog. Once the genome sequence of alfalfa (Medicago sativa) is publically available, the dTF22 ortholog can be found by comparison with the Medicago truncatula and switchgrass genes.

TABLE 14
Orthologs of dTFs in wheat

| Switchgrass | Wheat | |
|---|---|---|
| dTF | Gene | SEQ ID |
| 1 | Traes_5BL_138F3DBE5.1 | Gene: SEQ ID NO: 261 |
| | | Protein: SEQ ID NO: 516 |
| 2 | Traes_1BL_B30884E0E.1 | Gene: SEQ ID NO: 262 |
| | | Protein: SEQ ID NO: 517 |
| 3 | Traes_6DL_3BC4F011C.1 | Gene: SEQ ID NO: 263 |
| | | Protein: SEQ ID NO: 518 |
| 4 | Traes_5AL04D3E97F0.1 | Gene: SEQ ID NO: 264 |
| | | Protein: SEQ ID NO: 519 |
| 5 | Traes_5BL_1AE458202.1 | Gene: SEQ ID NO: 265 |
| | | Protein: SEQ ID NO: 520 |
| 6 | Traes_2BL_98439EA10.1 | Gene: SEQ ID NO: 266 |
| | | Protein: SEQ ID NO: 521 |
| 7 | Traes_5AS_2F996234C.5 | Gene: SEQ ID NO: 267 |
| | | Protein: SEQ ID NO: 522 |
| 8 | Traes_5BL_0C3609EF0.2 | Gene: SEQ ID NO: 268 |
| | | Protein: SEQ ID NO: 523 |
| 9 | Traes_2BL_B69300543.1 | Gene: SEQ ID NO: 269 |
| | | Protein: SEQ ID NO: 524 |
| 10 | Traes_4BL_B64C157DC. 1 | Gene: SEQ ID NO: 270 |
| | | Protein: SEQ ID NO: 525 |
| 11 | Traes_7DL_68B814464.1 | Gene: SEQ ID NO: 271 |
| | | Protein: SEQ ID NO: 526 |
| 12 | Traes_7AL_D45376F32.2 | Gene: SEQ ID NO: 272 |
| | | Protein: SEQ ID NO: 527 |
| 13 | Traes_4AS_094442636.5 | Gene: SEQ ID NO: 273 |
| | | Protein: SEQ ID NO: 528 |
| 14 | Traes_1BL_546DFB91B.1 | Gene: SEQ ID NO: 274 |
| | | Protein: SEQ ID NO: 529 |
| 15 | Traes_5BL_BA26B A910.1 | Gene: SEQ ID NO: 275 |
| | | Protein: SEQ ID NO: 530 |
| 16 | Traes_5BL_462E6AA25.2 | Gene: SEQ ID NO: 276 |
| | | Protein: SEQ ID NO: 531 |
| 17 | Traes_1AL_A4B5C1474.1 | Gene: SEQ ID NO: 277 |
| | | Protein: SEQ ID NO: 532 |
| 18 | Traes_7AS_F46AC277B.1 | Gene: SEQ ID NO: 278 |
| | | Protein: SEQ ID NO: 533 |
| 19 | Traes_1DL_2997D073B.1 | Gene: SEQ ID NO: 279 |
| | | Protein: SEQ ID NO: 534 |
| 20 | Traes_1ALB14FE48AF.3 | Gene: SEQ ID NO: 280 |
| | | Protein: SEQ ID NO: 535 |
| 21 | Traes_2DL_DE3909A32.1 | Gene: SEQ ID NO: 281 |
| | | Protein: SEQ ID NO: 536 |
| 22 | Traes_4AL_7241716B6.1 | Gene: SEQ ID NO: 282 |
| | | Protein: SEQ ID NO: 537 |
| | Traes_4DS_9575221BB.1 | Gene: SEQ ID NO: 287 |
| | (wheat homolog to SEO ID | Protein: SEQ ID NO: 540 |
| | NO: 282) | |
| | Traes_4BS_3BCDF0612.1 | Gene: SEQ ID NO: 288 |
| | (wheat homolog to SEQ ID | Protein: SEQ ID NO: 541 |
| | NO: 282) | |
| 59 | Traes_5BL_AAC9C7238.2 | Gene: SEQ ID NO: 283 |
| | | Protein: SEQ ID NO: 538 |
| 60 | Traes_2BL_C313CAB22.2 | Gene: SEQ ID NO: 284 |
| | | Protein: SEQ ID NO: 539 |

TABLE 15
dTF22 ortholog in Camelina sativa

| | |
|---|---|
| Switchgrass | Camelina |

| dTF | Gene | SEQ ID |
|---|---|---|
| 22 | Csa18g040020 | Gene: SEQ ID NO: 285 |
| | | Protein: SEQ ID NO: 542 |

### Example 7. Multiplex Editing of More than One Transcription Factor

[0303] Multiple dTFs can be edited to reduce or eliminate their activity in plants. The Venn diagram in FIG. 1 illustrates combinations of dTFs that are downregulated by more than one of the global regulatory genes STR1, STF1, and BMY1 using a cutoff of greater than 2 fold (log 2<−1). These include dTFs 1, 2, 3, 7, 9, 10, 18, and 22 (Table 1). Multiplex editing constructs can be produced to edit all dTFs selected from the group of dTF 1, 2, 3, 7, 9, 10, 18, and 22, or several select members of the group. We have found with our work in Camelina that multiplex editing will produce lines with all of the targets edited, as well as a range of lines with only some of the targets edited. Thus a multiplex editing vector can be designed to edit for example five of the dTFs and lines with combinations of less than five edits will typically also be isolated and can be tested.

[0304] While dTF22 is the only dTF that is downregulated by all three of the global regulatory genes STR1, STF1, and BMY1 by greater than 2 fold (log 2<−1), there are several dTFs that are downregulated by all three global regulatory genes by less than 2 fold, including dTFs 3, 9, 10, 14, 17, 18, and 60. Multiplex editing constructs can be constructed to simultaneously edit dTFs 3, 9, 10, 14, 17, 18, 22, and 60 or several dTFs selected from dTFs 3, 9, 10, 14, 17, 18, 22, and 60.

[0305] Multiplex editing of more than one dTF is illustrated using construct pYTEN-25 (FIG. 11, SEQ ID NO: 286) targeted to maize orthologs of dTFs 10, 18, 22 and 60 using the guide target sequence #4 for dTF10, dTF18, and dTF22 described in Table 9 and a guide target sequence of 5′-CTGAAGCCGAACCAGCCTGG-3′ (SEQ ID NO: 697) for dTF60.

[0306] Other useful gene combinations for editing include:

[0307] (a) dTF22 in combination with one more dTFs selected from dTFs 1-21 and dTFs 59-60;

[0308] (b) One or more of the dTFs selected from dTF1, dTF3, and dTF7, which are the three dTFs down regulated by more than 2 fold by both STR1 and BMY1 (FIG. 1, Table 1);

[0309] (c) dTF22 in combination with one or more of the dTFs selected from dTF1, dTF3, and dTF7;

[0310] (d) One or more of the dTFs selected from dTF2, dTF9, dTF10, and dTF18 which are the four dTFs down regulated by more than 2 fold by both STF1 and BMY1 (FIG. 1, Table 1); and

[0311] (e) dTF22 in combination with one or more of the dTFs selected from dTF2, dTF9, dTF10, and dTF18.

[0312] Genetic constructs for multiplex editing of these combinations can be constructed in a similar fashion as pYTEN-25 by switching the guide target sequences to match the genes to be targeted for editing.

[0313] Editing of dTF1, dTF2, and/or dTF7 can also be performed alone or in combination with dTF22. Example guide target sequences for editing of these downstream transcription factors in rice are shown in Table 16.

[0314] Useful gene combinations for editing in rice include:

[0315] (a) editing dTF1, 2, or 7 individually;

[0316] (b) multiplex editing of dTF22 and dTF1;

[0317] (c) multiplex editing of dTF22 and dTF2;

[0318] (d) multiplex editing of dTF22 and dTF7;

[0319] (e) multiplex editing of dTF1, 2, and 7;

[0320] (f) multiplex editing of dTF22, dTF1, dTF2, and dTF7;

[0321] (g) multiplex editing of dTF1 and dTF2;

[0322] (h) multiplex editing of dTF22, dTF1, and dTF2;

[0323] (i) multiplex editing of dTF1 and dTF7;

[0324] (j) multiplex editing of dTF22, dTF1 and dTF7;

[0325] (k) multiplex editing of dTF2 and dTF7; and

[0326] (l) multiplex editing of dTF22, dTF2, and dTF7.

TABLE 16
Guide target sequences for Cas9 mediated genome
editing of coding sequences of transcription
factor genes in rice

| | | Guide target | | |
|---|---|---|---|---|
| | | | Guide target | |
| | | | sequence | |
| Gene | Rice ortholog | Strand² | (5′ to 3′) | PAM³ |
| dTF1 | LOC_Os0lg47370 | + | CAACAGCAACAGTGTCA | TGG |
| | (SEQ ID NO: | | ACA (SEQ ID NO: | |
| | 189) | | 699) | |
| dTF2 | LOC_Os05g49240 | + | GAAGGAGAACAAGATG | AGG |
| | (SEQ ID NO: | | TTCG (SEQ ID NO: | |
| | 190) | | 700) | |
| dTF7 | LOC_Os12g40920 | − | TTTGATGTACCACTATT | TGG |
| | (SEQ ED NO: | | AGC (SEQ ID NO: | |
| | 195) | | 701) | |
| dTF22 | LOC_Os03g41330 | | TGCTGCGGCCGAGCATC | TGG |
| | (SEQ ID NO: | | GAG (SEQ ID NO: | |
| | 27) | | 554) | |

¹Sequence deposited under SEQ ID contains only the coding sequence of the gene.

### Example 8. CRISPR Editing with the CpfI Nuclease

[0327] In some cases, it may be desirable to use a nuclease with a different PAM sequence than the Cas9 enzyme. The CpfI class of enzymes have a different PAM sequence, depending on their source, allowing cuts at different genomic sequences than Cas9, which has a PAM sequence of “NGG”. There are several CpfI enzymes available (Zetsche et al., 2015, Cell, 163, 759; Gao et al., 2017, Nature Biotech., doi:10.1038/nbt.3900; Tang et al., 2017, Nat Plants, 3, Article number 17018; Wang et al., Molecular Plant, 2017, 10, 1011), some which are listed in Table 17 with their corresponding PAM sequences, all of which are useful for practicing this invention. Table 18 contains guide target sequences to illustrate the editing of the CDS of dTF22 using either the AsCpfI or the AsCpfI variant K607R enzymes.

TABLE 17
Cpfl enzymes and their variants
useful for genome editing

| Cpfl Enzyme | Source | PAM¹ |
|---|---|---|
| AsCpfl | Acidaminococcus sp. | TTTV |
| | BV3L6 | |
| AsCpfl S542R/K607R | AsCpfl variant | TYCV |
| AsCpfl S542R/K548V/N552R | AsCpfl variant | TATV |
| LbCpfl | Lachnospiraceae | TTTV |
| | bacterium ND2006 | |
| LbCpfl G532R/K595R | LbCpfl variant | TYCV |
| FnCpfl | Francisella novicida | TTN |
| | U112 (NC_008601) | |

¹Abbreviations in PAM consensus sequences; Y = C or T; V = A, C or G; N = any base

TABLE 18
Guide target sequences for Cpfl mediated editing of plant dTF22 genes

| | Locus name for dTF22 | | Target | | Guide target sequence |
|---|---|---|---|---|---|
| Plant species | ortholog¹ | CpfI Enzyme | strand² | PAM³ | (5′ to 3′) |
| Medicago truncatula⁴ | Medtr1g106420 | AsCpfl | + | TTTT | GAGAAAGGGATGCAGTG |
| | (SEQ ID NO: 33) | | | | AGGATT (SEQ ID NO: 702) |
| Camelina (Camelina sativa) | Csa18g040020 | AsCpfl | − | TTTC | AATCCATTGAATACATG |
| | (SEQ ID NO: 285) | | | | GTCGGA (SEQ ID NO: 703) |
| Canola (B. napus cv. Darmor-bzh) | BnaCO2g16720D | AsCpfl | + | TTTC | ATCTCCGCCGTACCGGA |
| | (SEQ ID NO: 186) | | | | ATCTCA (SEQ ID NO: 704) |
| Maize (Zea mays) | GRMZM2G017319 | AsCpfl | − | TCCG | CCCCAGCATCGACTGGA |
| | (SEQ ID NO: 28) | variant K607R | | | TCCACG (SEQ ID NO: 705) |
| Rice (Oryza sativa) | LOC_Os03g41330 | AsCpfl | − | TTTA | TCGTCCGCCCGCACGCCT |
| | (SEQ ID NO: 210) | | | | CGTAC (SEQ ID NO: 706) |
| Sorghum (Sorghum bicolor) | Sb0lg014800 | AsCpfl | − | TTTC | TGGACGGCGGCGCGGAG |
| | (SEQ ID NO: 258) | | | | GAGGAG (SEQ ID NO: 707) |
| Soybean (Glycine max) | Glyma05g22120 | AsCpfl | − | TTTC | GATCCACTGCAAACAAG |
| | (SEQ ID NO: 162) | | | | GGCGCA (SEQ ID NO: 708) |
| Wheat (Triticum aestivum) | Traes_4AL_7241716B6 | AsCpfl | + | TTCG | TCGCCAAGTTCTTCGGCC |
| | (SEQ ID NO: 34) | variant K607R | | | GCGCC (SEQ ID NO: 709) |

¹For maize, Medicago truncatula, and wheat, the SEQ ID includes the 5′ UTR region upstream of the ATG (predicted by Phytozome, MaizeGDB, GenBank, and/or transcript analysis), 1000 bp of promoter sequence upstream of the 5′ UTR, as well as the coding sequence of the gene including any introns. For soybean, Brassica napus, Camelina sativa, rice, and sorghum bicolor, the SEQ ID includes only the coding sequence of the gene.
²Strand (+/−) refers to the gRNA binding to either the forward strand of DNA (+) or its reverse complement (−).
³PAM refers to the protospacer adjacent motif for the CAS9 enzyme that resides directly adjacent to the 3′ end of the guide RNA target.
⁴The genome sequence for alfalfa (Medicago sativa) is not publically available. The sequence of a close relative to alfalfa, Medicago truncatula was used to find the dTF22 ortholog. Once the genome sequence of alfalfa (Medicago sativa) is publically available, the dTF22 ortholog can be found by comparison with the Medicago truncatula and switchgrass genes.

[0328] CpfI mediated genome editing can be performed as follows. Constructs are produced that contain the following expression cassettes: (a) an expression cassette for the CpfI gene that contains a promoter functional in that crop, the CpfI gene that includes nuclear localization sequences on the 5′ and 3′ end of the gene, and a terminator; (b) one or more expression cassettes for CRISPR RNAs that consists of a promoter, a gRNA that consists of 19 nucleotide repeat and a guide target sequence with about 23-25 bp homology downstream of a PAM sequence specific for the CpfI enzyme used (Fagerlund, R. D. 2015, Genome Biology, 16, 251); and a poly T-termination sequence. The promoter for gRNAs is preferably a U6 promoter functional in the crop to be transformed; and (c) an expression cassette for a selectable marker that can be used for the specific crop for selection of transformants. For Agrobacterium-mediated transformation, these expression cassettes can be cloned into one or more binary vectors for transformation of the appropriate explant of the crop. For stable transformation by particle bombardment or protoplast transformation, expression cassettes can be introduced as a DNA fragment(s) or can be localized on one or more simple plasmid vectors. For both methods, plants can be screened for edits using Next Generation Sequencing methods. After the edits are obtained, the expression cassettes described above can be removed by segregation using conventional breeding methods for the crop.

[0329] For transient expression in protoplasts, the expression cassettes described above for the CpfI and the gRNA can be introduced as one or more DNA fragments or can be localized on one or more simple vectors. An expression cassette for a selectable marker is not required. Protoplast cultures or alternatively, callus cultures derived from the protoplast cultures, can be screened for edits using Next Generation Sequencing methods, and protoplast or callus cultures with the edits can be regenerated into plants.

[0330] RNPs can also be used with the CpfI enzyme to perform DNA free genome editing in protoplasts (Kim, H. et al., 2016, Nature Communications, DOI: 10:1038/ncomms14406). For editing using RNPs, purified CpfI enzyme can be mixed with one or more gRNAs to form a complex of the CpfI enzyme and the gRNAs which can then be introduced directly to protoplasts. Protoplast cultures or alternatively, callus cultures derived from the protoplast cultures, can be screened for edits using Next Generation Sequencing methods, and protoplast or callus cultures with the edits can be regenerated into plants.

[0331] The ability of the CpfI enzyme to cleave its own CRISPR RNA also allows an array of sgRNAs to be arranged on a single genetic fragment which is subsequently cleaved by CpfI to initiate multiplex editing (Zetsche et al., 2017, Nature Biotech, 35, 31-34).

[0332] Reference to a “Sequence Listing,” a Table, or a Computer Program Listing Appendix Submitted as an ASCII Text File

[0333] The material in the ASCII text file, named “YTEN-59975WO-sequence-listing_ST25.txt”, created Oct. 30, 2018, file size of 1,409,024 bytes, is hereby incorporated by reference.

1. A method for modifying a plant, the method comprising downregulating expression, in a plant, of at least one polynucleotide sequence encoding a transcription factor that comprises a sequence-specific DNA binding domain with homology to proteins in the LBD family and has at least 30% sequence identity to SEQ ID NO: 310, thereby modifying the plant.

2-7. (canceled)

8. The method of claim 1, wherein the at least one polynucleotide sequence that is downregulated exhibits at least a two-fold change in expression as compared to that of a control plant.

9. The method of claim 8, wherein the at least one polynucleotide sequence that is downregulated has been downregulated by overexpression of one or more global transcription factors selected from STR1, BMY, or STIF1.

10. The method of claim 1, wherein the at least one polynucleotide sequence that is downregulated has been downregulated by one or more of gene inactivation, deletion, insertion and/or substitution of one or more nucleotides, site-specific mutagenesis, chemical mutagenesis, targeting induced local lesions in genomes (TILLING), knock-out techniques, gene editing techniques using CRISPR nuclease selected from Cas nuclease, Cas9 nuclease, CasX nuclease, CasY nuclease, a Cpf1 nuclease, a C2c1 nuclease, a C2c2 nuclease (Cas13a nuclease), or a C2c3 nuclease, NgAgo nuclease, TALEN or ZFN techniques, or gene silencing induced by RNA interference.

11. (canceled)

12. (canceled)

13. The method of claim 1, wherein the modified plant is soybean, canola, Medicago truncatula, alfalfa, sorghum, rice, wheat or Camelina.

14. The method of claim 1, wherein the modified plant exhibits one or more enhanced characteristics selected from higher photosynthesis rates, reduced photorespiration rates, higher biomass yield or content, higher seed yield, improved harvest index, higher seed oil content, improved nutritional composition, improved nitrogen use efficiency, drought resistance, flood resistance, disease resistance, faster seed germination and plant emergence, improved seedling vigor, salt tolerance, higher CO₂ assimilation rate, or lower transpiration rate.

15. The method of claim 14, wherein the modified plant exhibits an increase in seed oil content or seed yield as compared to a control plant.

16. The method of claim 15, wherein the seed oil content or seed yield of the modified plant is increased by 10%, 20%, 30%, 40%, 50%, 60%, 70%, 80%, 90%, 100% or higher relative to a control plant.

17-28. (canceled)

29. A DNA construct comprising:
(a) an expression cassette containing a polynucleotide sequence encoding a CRISPR nuclease;
(b) DNA encoding at least one guide RNA targeting the 5′ upstream region, promoter, terminator or coding sequence of a polynucleotide sequence encoding a transcription factor that comprises a sequence-specific DNA binding domain with homology to proteins in the LBD family and has at least 30% sequence identity to SEQ ID NO: 310; and
(c) an expression cassette for a selectable marker.

30. The DNA construct of claim 29, wherein the DNA encoding the at least one guide RNA is capable of downregulating the polynucleotide sequence encoding a transcription factor that comprises a sequence-specific DNA binding domain with homology to proteins in the LBD family and has at least 30% sequence identity to SEQ ID NO: 310, thereby producing enhanced characteristics in a plant selected from higher photosynthesis rates, reduced photorespiration rates, higher biomass yield or content, higher seed yield, improved harvest index, higher seed oil content, improved nutritional composition, improved nitrogen use efficiency, drought resistance, flood resistance, disease resistance, faster seed germination and plant emergence, improved seedling vigor, salt tolerance, higher CO₂ assimilation rate, or lower transpiration rate.

31. A modified plant comprising the DNA construct of claim 29.

32-39. (canceled)

40. A method of modifying a plant cell comprising:
(a) expressing one or more site-specific nucleases in a plant cell, wherein the one or more nucleases target and cleave chromosomal DNA of one or more endogenous genes, their promoters, their 5′UTRs, and/or their polyadenylation sequences, and wherein the one or more endogenous genes comprise a polynucleotide sequence encoding a transcription factor that comprises a sequence-specific DNA binding domain with homology to proteins in the LBD family and has at least 30% sequence identity to SEQ ID NO: 310;
(b) integrating one or more exogenous sequences into the one or more endogenous genes, their promoters, their 5′UTRs, and/or their polyadenylation sequences within the genome of the plant cell, wherein the one or more endogenous genes, their promoters, their 5′UTRs, and/or their polyadenylation sequences are modified such that the one or more endogenous genes do not express their corresponding endogenous gene product(s); and
(c) selecting modified plant cells that exhibit enhanced characteristics from among the plant cells in which the one or more exogenous sequences have been integrated.

41. The method of claim 40, wherein the one or more exogenous sequences are selected from a donor polynucleotide, a transgene, or a combination thereof.

42. The method of claim 40, wherein the one or more exogenous sequences encode a transgene and/or are expressed to produce an RNA molecule.

43. The method of claim 40, wherein the one or more exogenous sequences comprise a multiplex of gene edits made in the one or more endogenous genes, their promoters, their 5′UTRs, and/or their polyadenylation sequences.

44. (canceled)

45. (canceled)

46. The method of claim 40, wherein the one or more endogenous genes is downregulated.

47. (canceled)

48. (canceled)

49. The method of claim 40, wherein the modified plant cell is a cell of soybean, canola, Medicago truncatula, alfalfa, sorghum, rice, wheat or Camelina.

50-52. (canceled)

53. The method for modifying a plant according to claim 1, wherein the transcription factor that comprises a sequence-specific DNA binding domain with homology to proteins in the LBD family comprises one or more of SEQ ID NOs: 310, 334, 354, 371, 387, 417, 441, 465, 489, 513, 537, 540, 541, 542, 546, or 761.

54. The method for modifying a plant according to claim 1, wherein the at least one polynucleotide sequence has at least 30% sequence identity to one or more of SEQ ID NOs: 22, 56, 76, 93, 109, 162, 186, 210, 234, 258, 282, 285, 287, 288, 544, or 741.

55. The method for modifying a plant according to claim 54, wherein the at least one polynucleotide sequence comprises one or more of SEQ ID NOs: 22, 56, 76, 93, 109, 162, 186, 210, 234, 258, 282, 285, 544, or 741.

The application's sequence listing, which the Patent Office published only in electronic form, follows.

SEQUENCE LISTING (763 sequences)

SEQ ID NO: 1 - DNA, 267 bp, Panicum virgatum
atgtctgggtcgaggagctcttcttcccgcagcgtcaacgtggactccacgtggagcaaaaaagagaacaagctgtttgaagaggccctcgcctactacggcgacgacacacccgaccgctggcacaaggtgtcccgcgccattggaggcagcaagacggccgacgaggtgcgccgccattatgagttactcgatgaggacgtcaagctcattttgtccggcaatgttccgttccccaagtacaacacacaggggccttggaactaa

SEQ ID NO: 2 - DNA, 264 bp, Panicum virgatum
atggctggatcacggagctcctctcccaattccaactcaacgtggagcctgaaagagaacaagatgtttgaagaggcactcgcctactatggtgagggtgcgcccaacctgtgggacaaggtgtccagcgccatgggaggcaccaagtctgctgaggaggtgcgctgccactatgaagatcttgtcgacgacgtcaagatgattgagtcagggcgggttacgtaccccaagtacaagacacagggattctggaccggaggttga

SEQ ID NO: 3 - DNA, 294 bp, Panicum virgatum
atgagttcatcatggacagatgatcagaacaagctgtttgagagtttgctggcaatatatgacaaggacacaccagatcgctggcagaagattgcacgggcagttggcggtggaaagtcagttgaggatgtgaagaggcactaccacaagctgcagacggacctgcaggatattgaatctacaggaggctgtccaggatccaaccgcagcagctctggtggtagcagtagcaacggcagttcatgtggcaaggccaatgatgacaagaggacgaggtacctcaaaccgcagtga

SEQ ID NO: 4 - DNA, 1227 bp, Panicum virgatum
atggatcatgtcatctcaatggaggagatccttgaccccttttgggatctaccaccaccggagaaatctctggtgaccggcgacggcgtcatagatggcgttgttactaatggtgatggcgggtgtggcaacacggtcgatcagagctcctcagagtggagctttgagaggttactagaagaggagcttctagctgatgcatcagcagtggagaactctagcagtggctcagcccttcatgctgaaccagtggtggaggtggaccatgcagtgatggcgcctatggagattagcggattaggcaacgccatggagtacaacaccatcctgaagcggaagttggaggaggacctcgccaccgttgccatgtggagggcttctagtgttgtacctccagcacgttctcaaggttcaaccaattacattggaggtaacaggaatcctgtggagaacaagtccaccagtggtgaagaaggcccaataaatcgtgttcaaaatgcatatattcgtgcaaggtttgctgctacttgctcttcctcaagggagccttcaccatcagatgaagatgatatggatggagaagtagagatactgggatttaagttgcctactgaagagaaagtgaggaaaagaaaggaatccaatcgagaatcagccaggcgctcaagatatagaaaggcagctcacttgaaggacatggaggaccaggttgcacacttaagagttgaaaactcttctttgctgaggcgccttgctgctttgaaccagaagtatactgatgccactgttgacaatagggtgctgaaggctgacatggagaccctaagagctaaggtgaagatggcagaggatgccctgaagagggtcacaggggggatgagctcatcacaaccctccatgccccttcaggtgccggctagcactgacgcttcaggccctatccttgacaacatcattgactacctgatgagctcaacagatgccacggctgacaacaacttcgtgccgaggacgacggcccctgcgccattgcaagctgagaacccaaccagcaatggaacttccaacagcgtgatgctgaaccagattgcggcgcatcacgcggtagccgtcgagcttctccataacaggttgggtgccatgccgacctcctccgacagtacatcgccagaatctgtgccgtctggtgtggacgagtccatgagcatggatgctagtatgcattag

SEQ ID NO: 5 - DNA, 1047 bp, Panicum virgatum
atggggctcgacgtggcggagatcgggatggggctggatctggggctcgacctcaggctcttcgccgcgcggagcgccggcgggatggcggcggccgcggcaaagggcgcgcccgcgggaatcgaggcctgcatcaggagcctcgaggaggagcgccgcaagatcgaggtcttcaggcgcgagctcccgctctgcgtccgcctcctcgccgacgtgatcgaggagttgaaggaggaggccgcgaggaaaggcggcgattcggagttgaggccggacgacggcgacaagaggaaatggatgagcaccgcgcagctctgggtggactccgacgccacatccaagtccgagaaagagcaacgaaatgaggtgacctcgccggagcccaagttgctcggtggccccatgccgatacgggctgttccggcggtgccgctgccgcctccaccgtgcttcaggaaggatgacaacgcttcgggaactgccggattgcccggtctgtcgttgctgccacgggctgcaaagacatcggtctctccggtccctgccgttgatgaacaccggcagaacgctggcgccgcaagattgtctgccaccatgtcaccatctggccctggactcaacctgcatgctcagactcagcagcagcaacaacaggcgaggaagacaaggcggtgctggtcgccggagcttcaccggcagtttgttgctgccttgcatcaactcggtggcccacaagttgctactccgaagcagatcagagaggtgatgcaagtggacgggcttacaaacgacgaagtgaaaagccatctccagaagtaccggctgcacaacagaagatcgcccggcgtggctccggtgagccagtcgattgtgttggtgggtggcctctggggttctcaggagcaaagcagctcacagtcagggtctcctcagggcccccttcagttctctgggtcagggacggccatctctgcagccaccgtcggcggcgacggcagcagcagcgacgaagatggcaagtctgatgaaggctacagccggaaatga

SEQ ID NO: 6 - DNA, 426 bp, Panicum virgatum
atggatggcattaaagcgattggcgtgccggtggcgccgccggaactggatatggcgaccggcggctattattatccggaacatagcatgaaccatagcgtgagcagcagcgaagtggcggtggtgccggatgcgccggcggtgccggcggcgagccgcggcaaagaacgcgaagcgcgcctgatgcgctatcgcgaaaaacgcaaaaaccgccgctttgataaaaccattcgctatgcgagccgcaaagcgtatgcggaaacccgcccgcgcattaaaggccgctttgcgaaacgctgcagcagcgcggaagcggaagcggaagcggaagatgaagcgctgctggaacatgaagaagcggcgtgctttagcccggcggcgagcgcgccggcggcgagcagcgatggcgtggtgccgagcttttgc

SEQ ID NO: 7 - DNA, 435 bp, Panicum virgatum
atgggaagaatgatggcgttggtgcaatggacccagaagctgaggctaagggtcggacaccccggtcatccttacaacatagctgaggaagctgtcaggagactaacgggaacaacccttctgttatccaccaaatgtgacaagacagcaagcagcatgcgcttgacttcatatccatccgatgcgggttctgcttctgtcgccattgaagatagcatggaacattttcttcaggcgccccttcaaagcgatccgatcaagcttgaccacccaaatgcagcaattcttctgaccagacgggagatgggcaccaagccggattctctgcaacgtgttgctagcttggaggacctgcagaagaggatccatagagattcaatacattctgagactgcatcaacattctcagaccctgaagctcttgccaatgggtaa

SEQ ID NO: 8 - DNA, 675 bp, Panicum virgatum
atggagtacgacgagcaggagtcgccggaggccgccgccggggaggagtacgccacggtcatgtccgcgccgcccaagcgccccgcggggcggaccaagttccgggagacccgccacccggtgtaccgcggcgtgcggcggcgcggccccgcggggcgctgggtctgcgaggtccgggagcccaacaagaagtcccgcatctggctcggcaccttcgccaccgccgaggccgccgcgcgcgcgcacgacgtcgccgcgctcgcgctccggggccgcgcggcctgcctcaacttcgccgactcggcgcgcctgctccgcgtcgacccggccacgctcgccacccccgaggacatccgccgcgccgccatcgagctcgccgagggctccgcgcagcaggacgccgcggcggcggtcgcctcctcgtcgtccggggccgacgcggcggcaccgatggcgatggcgatgcaccaccagcaggacgccgcgccgtacgactacgcggcaatgtacggcaacatggacttcgaccagccgtactactacgacgggatgggcggcgccgccgccatcgggggcaacgactggcaggccggctggcatgtggacgcggacgacgacggtgcagccgccgcgggctgcggcagcgacatgacgctgtggagctactacgactga

SEQ ID NO: 9 - DNA, 591 bp, Panicum virgatum
atgttccaggcgcaccacgccaagctggagccccgggagaaggcggagctggcgcggcagctgggcctgcagccgcggcaggtggccatctggttccagaacaagcgcgcccggtggcgctccaagcagctcgagcacgactacgacgcgctccgcgacaagttcgacgccctccacgcccgcgtcgagtccctcaagcaggagaagctcgccctcgccgcacagttgcaagagctaagcgagaggctgagggagcgggaggaccaccgggccgccagtggcggcgtcgcggcgacggctagcagcagcagctgcaacggcggcgaggaggaggcggaggacgacaagaggaacgtcgtcctccggtgcgtcgacatggagccgcccgagagctgcgtgctcgccggggcgtgcgcgacgccgccggcggacgtctcggtggagtccgagtgcgacgaccaccaccgcctcgactacgacgacgggttgttcccggagtccttctgcgcgacgccggagctgtgggagccctggccgctcgtggagtggatgcggtcgcctgaaacggtggcggaagctagcagtacatag

SEQ ID NO: 10 - DNA, 822 bp, Panicum virgatum
atggcgagcgcggaggcggcggccggggtggcgccgttcgtggccaagacgtaccgcatggtggacgacccgtccacggacgccgtcgtcgcgtggggacgcgacagcaacagcttcgtcgtcgccgaccccttcgccttctcgcagacgctcctcctcgcgcacttcaagcactccaacttctccagcttcgtgcgccagctcaacacctacggcttccggaaggtggatccggaccggtgggagttcgcgcacgtcgcgttcctgcgcgggcagacgcacctgctgccccagatcgtgcgccggggcggcggcggcggcgggaagcgcaaggacgacggctcttcctgcggcgccaacgccggcgccgcggcggacgaggacgcggtggccatggaggtggtccggctcaggcgggagcagcgggccatcgaggaccaggtggccgccatgtggcgccgcgtgcaggagacggagcgccggtccaagcagatgctcgcgttcctcctcaaggtcgccggggacccgcaggtgctgcgccgcctcgtctcctccacggcggccgggagcggcggcggcggcggcggcgccgtcaggttcgccgccgcggcacccgagggggagcgcggcgccgccggggaggtggcggcgaagagggcgcgcctgctcctcgacgacgcgcccgtctacggcgccggcgccggcccctccgccgcggacctgggcgcggggttctacggcgccggcggcgaggacctcgggttcggcgccaaggccgctggcggatacctgcagccgccgccgtacgtgttgttaagataa

SEQ ID NO: 11 - DNA, 510 bp, Panicum virgatum
atgcagcaggatcagacgacgagctcgctgccctccagcagcgagtgctcctcgagctcggcgccgcagacggaggaggccagagaagggatggagagcgacgaggagatcgggcgggtgccggaggtcgggctggagctggccggcccgtcgacgtccggcagggagaccgccgcgggcgccggggccgggacgtcgtccgaggcccaggcggccagcgccgccgccgcccgccgccgcgtccgcagcccggccgacaaggagcaccgccgcctcaagaggttgctccggaaccgggtgtcggcgcagcaggcgcgggagaggaagaaggcgtacctgagcgagctggaggtgagggtgaaggacctggagaagcggaactcggagctggaggagaggctctccacgctgcagaacgagaaccagatgctcagacagatcctgaagaacaccactgtcaatagaagagggccgggtggcggtagcagcgccggcggagacagccaatag

SEQ ID NO: 12 - DNA, 1419 bp, Panicum virgatum
atgagctcccagagtgttgctactggggagcagattattgctcctgaccaaatagtacacgcctgcacatccacacaaacttcagttcataagctgtttgatgctaaactggaccacgggttcttgatagatgacactttgtcatccacaagtcaatcatcaaacatcaagactgaattgatccggacatcgagcttgtcaaggagcctatcggttaaccttcacaaaagaagccctgaatctgatccagaaagcccgctgtctcacgtttcacatcccaaattttctgacccaatattgtctaactcgtcaacgttctgcacaagcttgttttcttcgtcttcaaaaaacacagatccatgccggcaaatgggcactttacctttcctgcctcaccctcctaagtgtgagcagcaggtttcagctgggcagtcatcgagctcctctcttctcttaagtggtgatactggcaatgctttagaggaagctggacagtcagatgatctgaaagattttctcaatctttctggagatgcttctgatgggagcttccatggagaaagcaataccttgtcttttgatgaacagatggaatttcagtttctgtctgagcagctgggaattgccatcactgacaacgaggagagtcctcatttagatgacatatacggcacaccaccacaactgtcatcgcttccagaaccatcttgctccaaccagagtaaacagaatctagggtcaccagttaaagtccagcttagctcatctcggtcatcttctgactctgcaacaactaacaagtcaagattgaggtggacacttgagcttcatgagcgttttgtggaggctgtgaacaagcttgaaggacctgaaaaagcaactcctaaggctgtgctgaaactaatgaaggtagaaggcctaacaatttatcatgtaaagagtcatctgcagaagtatcggcttgcgaaatatcttcctgagcctaaggaagacaagaaggcttcctctgaggataagaaagcacaattgggtagcagcagcagtgattccagcaaaactaagaatttacaagtggcagaagctctaaggatgcaaatggaggttcagaaacagcttcacgaacaattagaggtgcaaaggcaattgcagctacggatagaggaacatgcaaggtacttgcagaaaatactggaagagcaacagaaggctggcaacttgtcgctgaaagcaccaaccaaagcacaagcagagtcacctgagacgactttaaaggagagaagcaaagctgagggaggtaccacttcaccgcggccatccaagaacagaaacccggacgtagacgcagaatgcaagtcgcctgtagggagcaagagatcaaaggttcaggttgatcctgagagagaggccccgtgttcgtag

SEQ ID NO: 13 - DNA, 969 bp, Panicum virgatum
atgtgcgggggcgccatcctcgcggagctgatcccgtcgccgcgccgggcggcgtcgaagccggtgaccgcgggccaccttaggccggcgggctccgactccaagaaagccggcagcgggaggagcaagaggcaccagctcgccgacgtcgacgactttgaggccgccttcgaggacttcgccgacgattttgacgaggaggaggtcgaggacggccaccacttcgtgttctcgtccaaatccgcattctccccagcccacggcgggcgcgcggcgccggcgacccagaagaagcgcggccgccgccacttccgcggcatccggcagcgcccctggggcaagtgggcggcggagatccgcgacccgcacaagggcacccgcgtctggctcggcaccttcaacaccgccgaggacgccgcccgggcctacgacgtcgaggcacgccgcctccgcggcagcaaggccaaggtcaacttccccgcggccggcgcgcgcccacgccgcggcaacgcgccgagaccgcagcgccaccatgctgcagcgcagcccgcgttgctcgcaggagagaagcagagggaggaggaggtcgtggtgaagcctgaaattggggcgtcgttcgacgtgggcagcttcttcgacatgaccttctccgccttccccgcggcggcgccggccatggagagctccttcaccggcagcgccgggtcggagtccggtagccccgcaaagaagatgagatacgacaacgactcgtccgatgggatgagctccggcggcggctccgcgctggagctcgctgacgagctcgcgttcgatccgttcatgctgctccagatgccctactcgggtgggtacgagtccctcgacggcctgttcgccgtcgacgccgcccaggacgtgaacaacggcatgaacggcgtcagcctgtggagcttcgacgagttccccgacgacagcgctgtcttctaa

SEQ ID NO: 14 - DNA, 303 bp, Panicum virgatum
atggcgtcgctgtcgatgaccagcagctcggtgcgggcgcagtggacgaagaagcagaacaagctcttcgagcaggcgttggccgtgtacgacaaggacacccccgaccggtggcacaacatcgcccgcgccgtcggcggcaagtccgccgaggaggtcaggcgctactacgagatgctggaggaggatgtcaagcacatcgagtccggcaaggtgcccctccccgcctaccgctgccccggcggcgccggcgccggcgccctcggctacgaggccgacaggatgaagcatctgaagatctag

SEQ ID NO: 15 - DNA, 1137 bp, Panicum virgatum
atggaggtctggaacaatgttgagagctccatggaggttcatcgtgagctgcacgatcatagccaagaagctgggggctcgggctccgacgacccaaggacgacggtgctcacgtacctgaccttcctggagcacaagatcgcgcacctccgcggcatcatctgctcggcgccgcagccgccgcggcagatcgtgtcggccgagctcagctgcatcgccgtgcagctcgtctccatctccaattccctcgccgccgccagcggggccacggcggaggaggacgccaagtccccgccgagagcggcgactccgagcgaaggggacagcgactcgtccgacgacgagcgcctgccgccggccggctcctacgaggtgatcgagctcggcaaggaggagatcctggcgccgcacgtgcactcgtgcaaggtctgcggcaagggcttcaagcgcgacgccaacctgcggatgcacatgcgcggccacggcgaggagtacaagacggcggccgcgctcgccaagcccggcagggacgcgccgccgccggcgtcggcggcccggtgcttctactcgtgccccttcgtggggtgcaagcggaacagggagcacaagagcttccagccgctcaagacggcggtctgcgtcaagaaccactaccgccggagccactgcgacaagagctacacctgccgccgctgcaacgtcaagcgcttctccgtgctcgccgacctgcgcacgcacgagaagcactgcggccgcgaccgatgggtctgctcctgcggcacgtccttctcccggaaggacaagctcttcggccacgtcgccgccttcgacggccacgcgccggcgctgccgcccgaggaggacgacgcggcggatcactctgcggccaatggccttggcaatgcctctgatcagatgctgatgggaaccgaggcagtaagcagaatggcgaacgatcaggagtgcttctctgatagcatctttgatgatctcagctgctctgacatcaaaggatttgctctcaccgataggcaatgtttggacgacgggcgagggtccctctccccgatggacctttattcctgtgacttcgatggatttgatctcttcggggcaccaggaattgctgatttctag

SEQ ID NO: 16 - DNA, 2652 bp, Panicum virgatum
atgtccccatggtttcctagcccaagatgtgcatggaggcatggagcttcgcctctccatctccagcaggggagaaatcctgaaagccttacctgcatggaagggggaggaggagacccccagccgagcgtctccctgcaggctcgcactccatccgaaggcggggcggccgtggacctggaccttctcgagcagctcctgtccggcgacaacggctggttcgaggtggtgtcacgctcgcccaactcgctggcgtctcccccacctgcggccttcttctcagcggacgtgacggcgaccgcggcggcggcgacgacgcaggccgcgagcagctggtggattcagacgggcggcgcgagcccctcctccgtgcgggagaggttcaaccaggcgctgtcctacatccgggagacgcagagcgacggcgacgtgctcgtgcagctctgggtgcccgtcaaccgtggcgacgggcagcttgtgctgaccacgagcgaccagccgttcacgctcgaccagcgctccgacagcctcatccggttcagggaggtgtccaccaagtaccagttctcggccgacgtcaagtcgggggactcgccgccggggcttccagggagagttttcattggcaggctacccgagtggtcgccagacatcaggtacttcaccagctacgagtatcccagggtaagggatgcacagcacctcgatgtccacggcaccatggggctgcctgtgttcgagaagggaagctacaactgcctgggggtcatcgagctgatcatgacaaggcagaagctcaacttcacctctgagctcaacaccatctgcagtgctctccaggcagttaatctgagaagcacagaagtttcaagcgttccacgcagacagttcagcactgcttcctacaaagatgctttaccagagatactggaagtcctgagagcagcttgcctcacccacaagctgccattagctcagacctgggtcacatgtgctcagcaaggaaaacggggcagccgacattccgatgagaactaccaatactgcatctccaccattgacgaagcatgctttgtgaatgaaccaaagatgcaagatttccatgatgcctgctctgagcaccacctactgcgggggcagggtgttgcagggaaagctttcactacaaaccagccatgcttcctgccagatattggatcctcaactaaacaggaatatccattgtctcaccatgctaagatctttgacttaaagggtgcggtagcgatccgactgcggtgcacgcgcactgggacggctgacttcgtgctggaattctttctgccaacagattgtgaagcacttgaggagcagaaggcagttctggactccttgtcaggtaccatgcgaagtgtttgccaaactctacgtgtggtcactgacaaggagatggaagatgaagcgatgtgggaaatgaatgagctgaactcatttactcctcaggggaagaacaaagttgaggagttgtcctttggaggcaattcagcagatcgtagaggagaggcctcttggacaagtctggcagaaacttcacagcaagaatcagagttagctgcattgcgaatgcatggaatgttctcatctggagggcagggtccatctctatctggtgttcaggcaactgcagaaggaagcaagacaaaaaggcgtacaaaggcggagaagaccgtgagcttgcaggttcttcggcagtatttcgctggtagcctgaaagatgcagcaaggagccttggagtgtgccctacaaccctcaaaagaatatgcagacagcatggtataacccgctggccatcacgaaagatcaagaaggtagaccgctctctaagaaagcttcaacagatcattgattcggttcatggagcagagacatctttccaactcaacaccttgtacaaggatctcacaaacacctcaatatcatctgaaaacaatttgtcaggaagtaacactattcctccaactaatcagagcaatcttaccaactttgacaagcaccaacaccacaaatcaaacagcattgtgccatcgacttcacactcacactcatcgtgcagccacaattctgattcaagcccctcatgtagcggtggtgcaacaaaacatgcaccacaggttataattgatctgatgaagtcaggaaatcctgtaaaagacagccctattcagactctgcaaacagaaaacacttcattatatgagcatttctcagttaatgaggcaccaaaggatcttccacaggatgttactgaaaaggctaatggtggactacattctaaacgaagcccatcatcccccaagcagaatgcagaagcaaacatgagagtaaaggccacatttggctcagaaaaggtgaggttcagattgaaccctgagtgcaactttcaagaactgaagcatgagatagcaaaacgtttgagcatagtagacacaagctccttgattttgaagtacttggatgatgattcagagtgggtcttgatgacatatgatgcagatttacaggagtgccttcatgtatacaaactagcagatatccaaacaatcaaaatttcagttcatttagctgttagtccagctacaagggtcactactggtcacactggtttgtcatga

SEQ ID NO: 17 - DNA, 1086 bp, Panicum virgatum
atggagccgtcggcggcggccgcgggcattgtgaaggaggagctcctggagcagcagccgctgcaggacggcgtgcgcggcggggacgcgccgcgcccgatggaggggctgcacgaggtcggccccccgccgttcctgaccaagacgttcgacctggtggaggacccggccaccgacgcggtcgtctcctggagccgcgccggcaacagcttcgtcgtctgggacccgcacgtcttcgccgacgcgctgctcccgcgcctcttcaagcacagcaacttctccagcttcgtccgacagctcaacacctatggcttcagaaaggtcgatcctgatagatgggagtttgcaaatgaaggtttcctcaggggtcaaaggcacctactgaagacaataaagagaaggaagccaccatcagctgtgccacaatcacatcaacagcaggcttccgcttcttgcctggaggttggtgagtttggatttgaggaagagattgacaggctgaagcgcgacaagaacatcttaatcacagaagtagtaaagctaaggcaggagcagcaaagtactaaagatcatgtgagagccatggaagagaggctacgcatggctgagcagaagcaggtacagatgatggggttcttggcaagagcaatgcggaatccagagttcttccagcagttggtccagcagcaagataagaggaaggaacttgaggaagccatctcaaagaaaagaaggcgaccgattgacaacactccgttctacagccctggggaaacaagtcagagcgaacagcttgattcacagttcaagtttgattctggcgtgcttgatgggctcagtgaacctggaatgcctgagctggagaatttagctgtgaacattcaggagcttggaaagggtagtacagatggtgcaaaaatggatcaagctaatggccattcagagctgaatgatgacttttgggcagacctattgatcgaagattttggagacaaggcagggcagtcagagttggaaggaaggcctgaagatgtggaggatcttgctcaacaactggggtatctgagttcttctagcccaaagtag

SEQ ID NO: 18 - DNA, 1131 bp, Panicum virgatum
atgaattataattttgacggcaacgccgtcgagaaggaggttggaggaggaggagaagggagttgcccatggcccaggccgtgcgacgggtgccgcgcggcgccgagcgtggtgtactgccgcgccgacgctgcgtacctctgcgcatcgtgcgacacgagggtgcacgccgcgaaccgcgtggcctcgcgccatgagcgtgtgcgcgtctgcgaggcatgcgagtgtgcccccgccgtgctggtgtgccgcgccgatgcagcagcgctgtgtgccacctgcgacgcgaaggtgcactctgcaaacccgctcgctgggaggcaccagcgcgtgcccgtggtgccactccccactgcagccattccggctgcttctgtgcttgccgaggcagcagccacccccgtggccatcggtgacaaggaagaggaggtggactcttggctgctgctcagcaaggattctgacgacgacaacaacaaaaacatcagcaccagaaacaacatcagtagcaacaacatgtactttgcagaagtggaagaatactttgatcttgttgggtacaattcatactgcgacaaccacatcaacagtacagagcagtacggaatgcaagaacggcagcagcagctgatgcaaaaagaatatggagataaggaggctggagagtgtgtggtaccttcacaagttgctatggcaaaagagcagcagcagagtggctatggagttgtaggggcagagcaggctgcctccataactgccgtggtcagtgcttacaccgattccatcagcaacagcatatctttctcatcaatggagcctatggaggtgggtatagtaccagacaacatggccacagacatggcaaactccagcgtcctgacacatgctggagccatcagtctcttctcaggtccttcacttcagatgccacttcacttcagcccaatggacagagaggccagggtcctaaggtacaaggagaagaagaagaatagaaagtttgagaagaccatacgttatgcaacaaggaagacatatgcagaagcacggccaaggatcaagggccgcttcgccagaagatctgatatggaaatcgaagtggaccagatgttcttaactgcagctgtctga

SEQ ID NO: 19 - DNA, 483 bp, Panicum virgatum
agaaatctcagtaacaaggctatacaacaacaggatatacagcaagtaaaagcagatgccttaagcttggcaaatagacttgaagcccttgaaaagtccaagaggaagtttttgggtgaaaatttagaagattgctctattgaagaactgcatagtttggaggtcaaactggagaagagtctccacgtcattagaggaaagaagacccaactgctggagcagcagatagccaagctgaaggagaaggagaggaccctgctcaaagacaacaaagaattacgcgaaaaggtgactgcaaccaagcacttaccgcaacgcgacgttcagccgccgccggtggctcccgccgtgacccgctgccttcccccgtggccgcggaatctgccggcgccttgcaacgacgacgtggacgtcgagacggagctctacattgggttacccggcagggagcgctccgccaaccgggattcgggttcggggtga

SEQ ID NO: 20 - DNA, 2046 bp, Panicum virgatum
atggggatcgatctcaacgccgtggaggaggacgagccggcgggggcggtgtgcggggagctgtggcacgcgtgcgcgggggcgggggtggcgctgccgcggcggggcagcgccgtcgtgtacctgccgcaggcgcacctcgcggcgggcggctgcggcgacggcatggaggtgccggccggtcccgcggcgcgcgtgccgccgcacgtggcgtgccgcgtcgtcgacgtcgacctacgcgcggatgcggcgacggacgaggtgtacgcgcggctcgcgctggtggcggagggcaagatgtttgaccaagatattcatgatgctgaaattgaagagaagaactgtgagatggaggatggtgatggagaaaagaagctaagaacgtcgcacatgttctgcaagacactcacagcttctgatacaagcacacatggagggttttctgttcctcggcgggctgctgaggattgctttccaccattggactatgaccagcttaggccatctcaagagctcattgccaaggatttacacggcatgaaatggaggttccgacatatctatagaggtcaaccacgtaggcatcttctgacaactggatggacttcatttatcaataagaagaaattagtctcaggggatgcggtcttgtttcttagaggtagtgatggcaagctaagattgggtgtgaggagagcagttcaactgaaaaatgaagctcttcttgaagctgtcaatagtactgattcaaagcaacgtacactgtctgctgtggtcagttccttggagaacagaagtatatttcacatttctttcaacccaaggactggtgcttcagaatttattgtgccgtattgcaaattcttggagaccttgaattgtcccttttcgattggaatgaggtttaaagttggcagcgagaatgaagatgctaaccagaggtcttgtggattgatctcaggtattagtgaagttgattccataggctggcctggatcaaaatggagatgtctccaggtcaaatgggatggtgatactaattgcaaccaccagaatagagtatctccatgggagatcgagagagttggcagctcaatttcagttcctcattgtctttcatcatctgtttcaaagcgaacaaaattgtgctttactcaaggtgatttggacgctccgattctagatggaaatggtcgtcctgactctttggaaactgaatgtttgcaccgggtcttgcaaggtcaagaattggtgcgctccaggactcacggtgctgcatgctctcattcatcagatacccccaaatgtcaaggctcgtatgaaaggagattctctgatgatgtgtggaactgcaagatgaatgatgcaatgagtgggctccgggaccaaaatgccactgggtttgcttaccagcccctaggcttcagtgaatctgttagattcccagaggtcttgcaaggtcaagaaatgtctcgggcggttccttccttccttggagctgctttcggtgctcgcatacagaatggcagaattggctcgtttgatgtgcagagaacagctggaactcaaggatatcccctccagcagttcagtctgctagcaacagaagcgcattcaccctcttctgttcttatggttaaccaaaccacggtgctacagcctgagctacaaggtatggccaaccttgaacaagcaaatggcagcccgtacgcccacatcgcaacgcagagagaagctgaaacctggccatctacgcagcagcaaagggcaagtgaaactggaagcgagcttttcaacacagctgaagcctcagcacctgctgctgttgctaaatctggattagctgacaagggagttaggcgaagcagctgcaggcttttcggtttctccttgaccgacgagatcctggtggcagaggaagatggcgggaaggaaaactacgaagctccgcaaactcccagggttctggacttgtttggacacagccaatctacacccagtgctctgcctctacatgctctctgcgctgctcccttgggaatttga

SEQ ID NO: 21 - DNA, 840 bp, Panicum virgatum
atggatccggcgataggcgatagcttggagtgcctcctctgggactgcctcgaatccgaagcgctgcagagcttgtgcatcggcgccggggccggcggcggcagcagccagcagcaccgcgacggttactccagcgccccggacgccgactccaactcctccgcggcgaccgcgggcgcggggagcatcggcagcaggcccggcagcagcatcgtcgtcacggagaggcgccgccgccggaggctcaacgaccggctctacgccctccgcagcgtggtccccaacatcaccaagatggacaaggcgtccatcctcggggacgccatcgagtacatcctgcagctgcagcagctcgagcgccagctgctcgccgagctagccctcctcgaggccggcgcgggcgcgcaccacctactggtcggcacgccaatgccgtctgccggcacgggggaagacgatgtccgcgcgggccacgccgccgtgtcgccgacgaaaagggtgaaacggagcccgtccttgtcgtccccggcggcgtcacgccacagcccctcctcgccgccggtcgacgctctgcaggtgagggtgtcgggcgccggggataaggtgctggtggtgagcgtcgcgtgccgccaccgaagggacgccgtggccaagctgtgccgcgcgctcgaggggctccgcctctgcgtcatcgccgccaacgtcaccgccgcgtcggggaccgtgacgcacaccgtgctcgtcccggtacagaatcgccgcccgtcttgccttctagcttttcccctccatctacagtacagtacaggtgtccttcgcagctgctttcccctggtccgt

SEQ ID NO: 22 - DNA, 726 bp, Panicum virgatum
atgagctgcaacggctgccgcgtgctgcgcaagggctgcagcgacgcctgcgtgctccggcccagcatcgagtggatcgacggcgcgcagccgcaggccaacgccaccgtcttcgtcgccaagttcttcggccgcgccggcctcgtcgcctccctcgccgccgtcccgctgcaccaccgcccagccctgttccggtcgctgctgtacgaggcctgcgggcggaccatcaacccggtgagcggcgccatcggcctcatgtggacgggcaactgggacctctgccaggcggccgccgacgccgtcctccgcggcgagtccctccgcgcgctctccgccatccccgccgcgttcacggaccgcgacatggacggcctctacggcagcgtcggcgccgccgcgtcctcctcctcgcccgagaactcctcctccgcgccgtccaggaagcgcggcaggaacaacaacaacggcggcctcgccttcgtcaacgccgccgccgccgccgccgtgcccgccgccggcgcctgccagaacccgccggcggggctgctgcagtcgtgcgagctggacctctgcctgacgccggcgtcgtcgccgatggcgggatcagggcgtcggggctgcggcggcgcgtcggacgagtactccgccacgacgacgtgcgaggacctgcaggccaccggcgacgtggaggccagggcgccggcgctgctgaacctcttccactga

SEQ ID NO: 23 - DNA, 1251 bp, Panicum virgatum
atggagctccggcactgttgccctccgtgcgttgccgcccctggtctcctccaccgcgccatagagctccggcactgttgccggctctcgccggcaccggagaagatcatgtggaaaaaaagtcacccgtggtctctccccttcgccgcgcgctgtgtcgccgtcgcctccgccaggccgcagccacagcagcagcagcagaggccgccggagcggaaggcgggaggtggcttcatggacgtcggctccagatccagcggtggggcgggcttcgacgacgacgacggcctcgccgctcgccgcgaggtctcctccacgctcaaagaactctcggtcagggtggagaccaaggggggaagctgcagcggcagcgctgggacggaccaactgcccaacacgccgcgctccaagcactccgccaccgagcagcgcaggcgcagcaagatcaacgacagatttcagatacttagagaaattttgccacaaaatgaccaaaagcgagacaaagcctcatttctcttagaggttatcgaatacataaggtttttgcaagagaaagtacaaaagtacgaggtttcgaacccagaatggaaccaagaaaatgcaaagatcgtgccatggtctaacatctacttccgatcgtcctggaaaaatttacagaacaaggacgaaataaatggagatatggcctctgatccatcgcaagttataaaaaatggtttgtccccacgattcccttttgctgcaaagcctgaggaccataacaatgcaggtgcatttgaaactgcttcgggtgcacaggaactggcagaaccaaagggttgtgtgcccttcaaaccggctgaaactcccagcaaaatcacaaacactgttgcatcccagcaaccaacacaattgacaaatccattgccttcagacgactgtgcagcacccaatggaatgttaagcaacccagaattggcaatagacgaggggacaatcagtttgtcaagccaatattcccaagggctgcttactacgctgaatcttgcccttcaaaactcgggtatagatttgtcacaagctagcatctcggtgcagataaaccttggtaagcgggctaccaagagatctgctcctgggtcaaactccacctccaagaatctcatcaaccaagcgtcccgtgatcaagagatcgggcaccagctgaggtcaggggatggcgcaagagaacattcccaggcgactaagcgccacaagtcagacagataa

SEQ ID NO: 24 - DNA, 603 bp, Panicum virgatum
atgtccgaccacggcggaccggcctcgccgcggacggggaagcacccctactaccgcggcatccgcagccgcagcggcaagtgggtgtcggagatccgggagccgaggaagacgcgccgcatctggctcggcaccttcccgacggccgagatggccgccgtggcctacgacgtggccgcgcgcgcgctgcgcgggcccgacacggtggtcaacttcccggacctggccgcgtcgcgccccgcgcccgcgtccacctccgcggacgacatccgcgccgccgccgcggaggccgccgcggcgctgcaggagcccgatcgccggcgggcccgcggcattgcccccgcggcggccggtggagacgcgcagcagcagcagacggccggcgggagcagtggcgcggcgccgcagcaggaaggcggtggcagcggcgcggggagccactacttcctggacgacgaggcgctcttcgagacgccgcagtacctgcgcaacatggccgccgggatgatgatgagccccccgaggctcggccacaactcctccgacgactcgccggacccgtcggaggccggggatagcctctggagctaccgtgatccgtag

SEQ ID NO: 25 - DNA, 13143 bp, Artificial Sequence
  Synthetic construct pMBXS1032
catgccaaccacagggttcccctcgggatcaaagtactttgatccaacccctccgctgctatagtgcagtcggcttctgacgttcagtgcagccgtcttctgaaaacgacatgtcgcacaagtcctaagttacgcgacaggctgccgccctgcccttttcctggcgttttcttgtcgcgtgttttagtcgcataaagtagaatacttgcgactagaaccggagacattacgccatgaacaagagcgccgccgctggcctgctgggctatgcccgcgtcagcaccgacgaccaggacttgaccaaccaacgggccgaactgcacgcggccggctgcaccaagctgttttccgagaagatcaccggcaccaggcgcgaccgcccggagctggccaggatgcttgaccacctacgccctggcgacgttgtgacagtgaccaggctagaccgcctggcccgcagcacccgcgacctactggacattgccgagcgcatccaggaggccggcgcgggcctgcgtagcctggcagagccgtgggccgacaccaccacgccggccggccgcatggtgttgaccgtgttcgccggcattgccgagttcgagcgttccctaatcatcgaccgcacccggagcgggcgcgaggccgccaaggcccgaggcgtgaagtttggcccccgccctaccctcaccccggcacagatcgcgcacgcccgcgagctgatcgaccaggaaggccgcaccgtgaaagaggcggctgcactgcttggcgtgcatcgctcgaccctgtaccgcgcacttgagcgcagcgaggaagtgacgcccaccgaggccaggcggcgcggtgccttccgtgaggacgcattgaccgaggccgacgccctggcggccgccgagaatgaacgccaagaggaacaagcatgaaaccgcaccaggacggccaggacgaaccgtttttcattaccgaagagatcgaggcggagatgatcgcggccgggtacgtgttcgagccgcccgcgcacgtctcaaccgtgcggctgcatgaaatcctggccggtttgtctgatgccaagctggcggcctggccggccagcttggccgctgaagaaaccgagcgccgccgtctaaaaaggtgatgtgtatttgagtaaaacagcttgcgtcatgcggtcgctgcgtatatgatgcgatgagtaaataaacaaatacgcaaggggaacgcatgaaggttatcgctgtacttaaccagaaaggcgggtcaggcaagacgaccatcgcaacccatctagcccgcgccctgcaactcgccggggccgatgttctgttagtcgattccgatccccagggcagtgcccgcgattgggcggccgtgcgggaagatcaaccgctaaccgttgtcggcatcgaccgcccgacgattgaccgcgacgtgaaggccatcggccggcgcgacttcgtagtgatcgacggagcgccccaggcggcggacttggctgtgtccgcgatcaaggcagccgacttcgtgctgattccggtgcagccaagcccttacgacatatgggccaccgccgacctggtggagctggttaagcagcgcattgaggtcacggatggaaggctacaagcggcctttgtcgtgtcgcgggcgatcaaaggcacgcgcatcggcggtgaggttgccgaggcgctggccgggtacgagctgcccattcttgagtcccgtatcacgcagcgcgtgagctacccaggcactgccgccgccggcacaaccgttcttgaatcagaacccgagggcgacgctgcccgcgaggtccaggcgctggccgctgaaattaaatcaaaactcatttgagttaatgaggtaaagagaaaatgagcaaaagcacaaacacgctaagtgccggccgtccgagcgcacgcagcagcaaggctgcaacgttggccagcctggcagacacgccagccatgaagcgggtcaactttcagttgccggcggaggatcacaccaagctgaagatgtacgcggtacgccaaggcaagaccattaccgagctgctatctgaatacatcgcgcagctaccagagtaaatgagcaaatgaataaatgagtagatgaattttagcggctaaaggaggcggcatggaaaatcaagaacaaccaggcaccgacgccgtggaatgccccatgtgtggaggaacgggcggttggccaggcgtaagcggctgggttgtctgccggccctgcaatggcactggaacccccaagcccgaggaatcggcgtgacggtcgcaaaccatccggcccggtacaaatcggcgcggcgctgggtgatgacctggtggagaagttgaaggccgcgcaggccgcccagcggcaacgcatcgaggcagaagcacgccccggtgaatcgtggcaagcggccgctgatcgaatccgcaaagaatcccggcaaccgccggcagccggtgcgccgtcgattaggaagccgcccaagggcgacgagcaaccagattttttcgttccgatgctctatgacgtgggcacccgcgatagtcgcagcatcatggacgtggccgttttccgtctgtcgaagcgtgaccgacgagctggcgaggtgatccgctacgagcttccagacgggcacgtagaggtttccgcagggccggccggcatggccagtgtgtgggattacgacctggtactgatggcggtttcccatctaaccgaatccatgaaccgataccgggaagggaagggagacaagcccggccgcgtgttccgtccacacgttgcggacgtactcaagttctgccggcgagccgatggcggaaagcagaaagacgacctggtagaaacctgcattcggttaaacaccacgcacgttgccatgcagcgtacgaagaaggccaagaacggccgcctggtgacggtatccgagggtgaagccttgattagccgctacaagatcgtaaagagcgaaaccgggcggccggagtacatcgagatcgagctagctgattggatgtaccgcgagatcacagaaggcaagaacccggacgtgctgacggttcaccccgattactttttgatcgatcccggcatcggccgttttctctaccgcctggcacgccgcgccgcaggcaaggcagaagccagatggttgttcaagacgatctacgaacgcagtggcagcgccggagagttcaagaagttctgtttcaccgtgcgcaagctgatcgggtcaaatgacctgccggagtacgatttgaaggaggaggcggggcaggctggcccgatcctagtcatgcgctaccgcaacctgatcgagggcgaagcatccgccggttcctaatgtacggagcagatgctagggcaaattgccctagcaggggaaaaaggtcgaaaaggtctctttcctgtggatagcacgtacattgggaacccaaagccgtacattgggaaccggaacccgtacattgggaacccaaagccgtacattgggaaccggtcacacatgtaagtgactgatataaaagagaaaaaaggcgatttttccgcctaaaactctttaaaacttattaaaactcttaaaacccgcctggcctgtgcataactgtctggccagcgcacagccgaagagctgcaaaaagcgcctacccttcggtcgctgcgctccctacgccccgccgcttcgcgtcggcctatcgcggccgctggccgctcaaaaatggctggcctacggccaggcaatctaccagggcgcggacaagccgcgccgtcgccactcgaccgccggcgcccacatcaaggcaccctgcctcgcgcgtttcggtgatgacggtgaaaacctctgacacatgcagctcccggagacggtcacagcttgtctgtaagcggatgccgggagcagacaagcccgtcagggcgcgtcagcgggtgttggcgggtgtcggggcgcagccatgacccagtcacgtagcgatagcggagtgtatactggcttaactatgcggcatcagagcagattgtactgagagtgcaccatatgcggtgtgaaataccgcacagatgcgtaaggagaaaataccgcatcaggcgctcttccgcttcctcgctcactgactcgctgcgctcggtcgttcggctgcggcgagcggtatcagctcactcaaaggcggtaatacggttatccacagaatcaggggataacgcaggaaagaacatgtgagcaaaaggccagcaaaaggccaggaaccgtaaaaaggccgcgttgctggcgtttttccataggctccgcccccctgacgagcatcacaaaaatcgacgctcaagtcagaggtggcgaaacccgacaggactataaagataccaggcgtttccccctggaagctccctcgtgcgctctcctgttccgaccctgccgcttaccggatacctgtccgcctttctcccttcgggaagcgtggcgctttctcatagctcacgctgtaggtatctcagttcggtgtaggtcgttcgctccaagctgggctgtgtgcacgaaccccccgttcagcccgaccgctgcgccttatccggtaactatcgtcttgagtccaacccggtaagacacgacttatcgccactggcagcagccactggtaacaggattagcagagcgaggtatgtaggcggtgctacagagttcttgaagtggtggcctaactacggctacactagaaggacagtatttggtatctgcgctctgctgaagccagttaccttcggaaaaagagttggtagctcttgatccggcaaacaaaccaccgctggtagcggtggtttttttgtttgcaagcagcagattacgcgcagaaaaaaaggatctcaagaagatcctttgatcttttctacggggtctgacgctcagtggaacgaaaactcacgttaagggattttggtcatgcattctaggtactaaaacaattcatccagtaaaatataatattttattttctcccaatcaggcttgatccccagtaagtcaaaaaatagctcgacatactgttcttccccgatatcctccctgatcgaccggacgcagaaggcaatgtcataccacttgtccgccctgccgcttctcccaagatcaataaagccacttactttgccatctttcacaaagatgttgctgtctcccaggtcgccgtgggaaaagacaagttcctcttcgggcttttccgtctttaaaaaatcatacagctcgcgcggatctttaaatggagtgtcttcttcccagttttcgcaatccacatcggccagatcgttattcagtaagtaatccaattcggctaagcggctgtctaagctattcgtatagggacaatccgatatgtcgatggagtgaaagagcctgatgcactccgcatacagctcgataatcttttcagggctttgttcatcttcatactcttccgagcaaaggacgccatcggcctcactcatgagcagattgctccagccatcatgccgttcaaagtgcaggacctttggaacaggcagctttccttccagccatagcatcatgtccttttcccgttccacatcataggtggtccctttataccggctgtccgtcatttttaaatataggttttcattttctcccaccagcttatataccttagcaggagacattccttccgtatcttttacgcagcggtatttttcgatcagttttttcaattccggtgatattctcattttagccatttattatttccttcctcttttctacagtatttaaagataccccaagaagctaattataacaagacgaactccaattcactgttccttgcattctaaaaccttaaataccagaaaacagctttttcaaagttgttttcaaagttggcgtataacatagtatcgacggagccgattttgaaaccgcggtgatcacaggcagcaacgctctgtcatcgttacaatcaacatgctaccctccgcgagatcatccgtgtttcaaacccggcagcttagttgccgttcttccgaatagcatcggtaacatgagcaaagtctgccgccttacaacggctctcccgctgacgccgtcccggactgatgggctgcctgtatcgagtggtgattttgtgccgagctgccggtcggggagctgttggctggctggtggcaggatatattgtggtgtaaacaaattgacgcttagacaacttaataacacattgcggacgtttttaatgtactgaattaacgccgaattaattcgggggatctggattttagtactggattttggttttaggaattagaaattttattgatagaagtattttacaaatacaaatacatactaagggtttcttatatgctcaacacatgagcgaaaccctataggaaccctaattcccttatctgggaactactcacacattattatggagaaactcgagtcaaatctcggtgacgggcaggaccggacggggcggtaccggcaggctgaagtccagctgccagaaacccacgtcatgccagttcccgtgcttgaagccggccgcccgcagcatgccgcggggggcatatccgagcgcctcgtgcatgcgcacgctcgggtcgttgggcagcccgatgacagcgaccacgctcttgaagccctgtgcctccagggacttcagcaggtgggtgtagagcgtggagcccagtcccgtccgctggtggcggggggagacgtacacggtcgactcggccgtccagtcgtaggcgttgcgtgccttccaggggcccgcgtaggcgatgccggcgacctcgccgtccacctcggcgacgagccagggatagcgctcccgcagacggacgaggtcgtccgtccactcctgcggttcctgcggctcggtacggaagttgaccgtgcttgtctcgatgtagtggttgacgatggtgcagaccgccggcatgtccgcctcggtggcacggcggatgtcggccgggcgtcgttctgggctcatggtagaccgcttggtatctgcattacaatgaaatgagcaaagactatgtgagtaacactggtcaacactagggagaaggcatcgagcaagatacgtatgtaaagagaagcaatatagtgtcagttggtagatactagataccatcaggaggtaaggagagcaacaaaaaggaaactctttatttttaaattttgttacaacaaacaagcagatcaatgcatcaaaatactgtcagtacttatttcttcagacaacaatatttaaaacaagtgcatctgatcttgacttatggtcacaataaaggagcagagataaacatcaaaatttcgtcatttatatttattccttcaggcgttaacaatttaacagcacacaaacaaaaacagaataggaatatctaattttggcaaataataagctctgcagacgaacaaattattatagtatcgcctataatatgaatccctatactattgacccatgtagtatgaagcctgtgcctaaattaacagcaaacttctgaatccaagtgccctataacaccaacatgtgcttaaataaataccgctaagcaccaaattacacatttctcgtattgctgtgtaggttctatcttcgtttcgtactaccatgtccctatattttgctgctacaaaggacggcaagtaatcagcacaggcagaacacgatttcagagtgtaattctagatccagctaaaccactctcagcaatcaccacacaagagagcattcagagaaacgtggcagtaacaaaggcagagggcggagtgagcgcgtaccgaagacggtctcgagagagatagatttgtagagagagactggtgatttcagcgtgtcctctccaaatgaaatgaacttccttatatagaggaaggtcttgcgaaggatagtgggattgtgcgtcatcccttacgtcagtggagatatcacatcaatccacttgctttgaagacgtggttggaacgtcttctttttccacgatgctcctcgtgggtgggggtccatctttgggaccactgtcggcagaggcatcttgaacgatagcctttcctttatcgcaatgatggcatttgtaggtgccaccttccttttctactgtccttttgatgaagtgacagatagctgggcaatggaatccgaggaggtttcccgatattaccctttgttgaaaagtctcaatagccctttggtcttctgagactgtatctttgatattcttggagtagacgagagtgtcgtgctccaccatgttatcacatcaatccacttgctttgaagacgtggttggaacgtcttctttttccacgatgctcctcgtgggtgggggtccatctttgggaccactgtcggcagaggcatcttgaacgatagcctttcctttatcgcaatgatggcatttgtaggtgccaccttccttttctactgtccttttgatgaagtgacagatagctgggcaatggaatccgaggaggtttcccgatattaccctttgttgaaaagtctcaatagccctttggtcttctgagactgtatctttgatattcttggagtagacgagagtgtcgtgctccaccatgttggcaagctgctctagccaatacgcaaaccgcctctccccgcgcgttggccgattcattaatgcagctggcacgacaggtttcccgactggaaagcgggcagtgagcgcaacgcaattaatgtgagttagctcactcattaggcaccccaggctttacactttatgcttccggctcgtatgttgtgtggaattgtgagcggataacaatttcacacaggaaacagctatgaccatgattacgaattgggagtttaaaccacggaagatccaggtctcgagactaggagacggatgggaggcgcaacgcgcgatggggaggggggcggcgctgacctttctggcgaggtcgaggtagcgatcgagcagctgcagcgcggacacgatgaggaagacgaagatagccgccatggacatgttcgccagcggcggcggagcgaggctgagccggtctctccggcctccggtcggcgttaagttggggatcgtaacgtgacgtgtctcgtctccacggatcgacacaaccggcctactcgggtgcacgacgccgcgataagggcgagatgtccgtgcacgcagcccgtttggagtcctcgttgcccacgaaccgaccccttacagaacaaggcctagcccaaaactattctgagttgagcttttgagcctagcccacctaagccgagcgtcatgaactgatgaacccactaccactagtcaaggcaaaccacaaccacaaatggatcaattgatctagaacaatccgaaggaggggaggccacgtcacactcacaccaaccgaaatatctgccagaatcagatcaaccggccaataggacgccagcgagcccaacacctggcgacgccgcaaaattcaccgcgaggggcaccgggcacggcaaaaacaaaagcccggcgcggtgagaatatctggcgactggcggagacctggtggccagcgcgcggccacatcagccaccccatccgcccacctcacctccggcgagccaatggcaactcgtcttaagattccacgagataaggacccgatcgccggcgacgctatttagccaggtgcgccccccacggtacactccaccagcggcatctatagcaaccggtccagcactttcacgctcagcttcagcaagatctaccgtcttcggtacgcgctcactccgccctctgcctttgttactgccacgtttctctgaatgctctcttgtatggtgattgctgagagtggtttagctggatctagaattacactctgaaatcgtgttctgcctgtgctgattacttgccgtcctttgtagcagcaaaatatagggacatggtagtacgaaacgaagatagaacctacacagcaatacgagaaatgtgtaatttggtgcatacggtatttatttaagcacctgttgctgctatagggcacttgtattcagaagtttgctgttaatttaggcacaggcttcatactacatgggtcaatagtatagggattcatattataggcgatactataataatttgttcgtctgcagagcttattatttgccaaaattagatattcctattctgtttttgtttgtgtgctgttaaattgttaacgcctgaaggaataaatataaatgacgaaattttgatgtttatctctgctcctttattgtgacgataagtcaagatcagatgcacttgttttaaatattgttgtctgaagaaataagtactgacagttttttgatgcattgatctgcttgtttgttgtaacaaaattttaaaataaagagttccctttttgttgctctccttacctcctgatggtatctagtatctaccaactgatactatattgcttctctttacatacgtatcttgctcgatgccttctcctagtgttgaccagtgttactcacatagtctttgctcatttcattgtaatgcagataccaagcggttaattaaatgagctgcaacggctgccgcgtgctgcgcaagggctgcagcgacgcctgcgtgctccggcccagcatcgagtggatcgacggcgcgcagccgcaggccaacgccaccgtcttcgtcgccaagttcttcggccgcgccggcctcgtcgcctccctcgccgccgtcccgctgcaccaccgcccaggtaactagctaatcaaccaacagccggcctcgttatacttgtactcctcggccgtgtctccagtatcagctagctattccatcggcagactcatagtatcatcatctgttctagataaaagtaattacagtacttcaggttgatcgtgccatagtaatataagtaattataggttcaattattcggtagtgtgaactaatggcatcgtaagatcagccttgttaattagtagatagtagtgtctgcagttaactgctgcaggccggcgctttgttctcatctagaccaagcaacaatgttatcttgaagagaatactagctagacgagacctgaccctgacctgtccacaaaggtatccgcgcaagtaccatcgttttaacatttctttatggcgttacgcggccttccgacgcccccatgggacaaaggccacaaaaagcagaatcttttttctggccaggcccaacccaacccaaatgctacttcaccaaaccgactcgaacatatttgtgttctggcagatcagatacgctagttattaatttttttgaagcgaagatatgctagttattaattggctgatgggattttgtagtcatgatttcaaccttttcgtctttcggcgacttatagttaacttttgtaaggatgatataattggcttttaatttgactttgaactgtgcatggctcctgacaaagccagatatatataataccttctattgttctatccttgcattggccctgtaaaagaaaacagactaaagcaattgccttctttatttattgtagtcatggtttcattaatcaatttacacaaaaaccattatacaatcgtagttccttgcatacttaatcatcatgtaatatatatgaatcgaaacacataattatattgattataagctcactctaagcgcacttaagcggttgtttagttgcttttttttttctagttaacaatgatttcatcaaactcggaaatgtcatattagcattttttatgtcaaattgtagagcacgcgtgattcctgaaaaggtttgagttttagccggccgcatcatgttcattgtgtgcaaataacaaaaaaagttcattgtgtatgcattgggggttggttgagttaacgactgacgtggcatgcacacgtggatggatgcagccctgttccggtcgctgctgtacgaggcctgcgggcggaccatcaacccggtgagcggcgccatcggcctcatgtggacgggcaactgggccctctgccaggcggccgccgacgccgtcctccgcggcgagtccctccacgcgctctccaccatccccgccgcgttcacggaccgcgacatggacggcctctacggcagcgtcggcgccgccgcgtcctcctcctcgcccgagaactcctcctccgcgccgtccaggaagcgcggcaggaacaacaacaacggcggcctcgccttcgtcaacgccgccgccgccgccgccgtgcccgccaccggcgcctgccagaacccgccggcggggctgctgcagtcgtgcgagctggacctctgcctgacgccggcgtcgtcgcctatggcgggatcagggagtcggggctgcggcggcgcgtcggacgagtactccgccacgacgacatgcgaggacctgcaggccaccggcgacgtggaggccagggcgccggcgctgctgaacctcttccactgactgattgtgccatcgcccttcttctttcttccttgtacttgtaagaagatggcgcgccatcgttcaaacatttggcaataaagtttcttaagattgaatcctgttgccggtcttgcgatgattatcatataatttctgttgaattacgttaagcatgtaataattaacatgtaatgcatgacgttatttatgagatgggtttttatgattagagtcccgcaattatacatttaatacgcgatagaaaacaaaatatagcgcgcaaactaggataaattatcgcgcgcggtgtcatctatgttactagatccgatgataagctgtcaaacatgacctcaggatgaagcttagagcttggcactggccgtcgttttacaacgtcgtgactgggaaaaccctggcgttacccaacttaatcgccttgcagcacatccccctttcgccagctggcgtaatagcgaagaggcccgcaccgatcgcccttcccaacagttgcgcagcctgaatggcgaatgctagagcagcttgagcttggatcagattgtcgtttcccgccttcagtttaaactatcagtgtttgacaggatatattggcgggtaaacctaagagaaaagagcgtttattagaataacggatatttaaaagggcgtgaaaaggtttatccgttcgtccatttgtatgtg

SEQ ID NO: 26 - DNA, 16043 bp, Artificial Sequence
  Synthetic construct pYTEN-24
cctactccaaaaatgtcaaagatacagtctcagaagaccaaagggctattgagacttttcaacaaagggtaatttcgggaaacctcctcggattccattgcccagctatctgtcacttcatcgaaaggacagtagaaaaggaaggtggctcctacaaatgccatcattgcgataaaggaaaggctatcattcaagatgcctctgccgacagtggtcccaaagatggacccccacccacgaggagcatcgtggaaaaagaagacgttccaaccacgtcttcaaagcaagtggattgatgtgacatctccactgacgtaagggatgacgcacaatcccacccctactccaaaaatgtcaaagatacagtctcagaagaccaaagggctattgagacttttcaacaaagggtaatttcgggaaacctcctcggattccattgcccagctatctgtcacttcatcgaaaggacagtagaaaaggaaggtggctcctacaaatgccatcattgcgataaaggaaaggctatcattcaagatgcctctgccgacagtggtcccaaagatggacccccacccacgaggagcatcgtggaaaaagaagacgttccaaccacgtcttcaaagcaagtggattgatgtgacatctccactgacgtaagggatgacgcacaatcccactatccttcgcaagacccttcctctatataaggaagttcatttcatttggagaggacagcccccaccatggcgtgcaggtcgactctagaggatccatggcaccgaagaagaagagaaaggtcgggattcacggcgttcctgcggcgatggataagaagtatagcattgggcttgacattggcacgaactccgtgggctgggccgtcatcaccgacgagtacaaggtgccgtctaagaagttcaaggtcctgggcaacaccgatcggcactcaatcaagaagaatctcattggagcactcctgttcgactccggagagacagcggaggccacgcggctcaagaggacagcgcgcaggcggtacacgcgcaggaagaatcgcatctgctacctccaggagatcttcagcaacgagatggcgaaggtggacgattcattcttccataggctggaggagtcgttcctcgtcgaggaagacaagaagcacgagcggcatccgatcttcggcaacatcgtggacgaggtcgcctaccacgagaagtacccaacaatctaccatctgcggaagaagctcgtggactcgacggataaggcggacctccgcctgatctacctcgccctggcgcacatgatcaagttcaggggccatttcctgatcgagggcgatctcaaccctgacaattccgatgtggacaagctgttcatccagctcgtccagacctacaatcagctcttcgaggagaacccgatcaatgcctctggcgtggacgccaaggcgatcctgtcagcgaggctctctaagtcacggcgcctcgagaacctgatcgcccagctccctggcgagaagaagaacggcctgttcggcaatctcattgccctctcgctgggcctcacccctaacttcaagtccaatttcgatctcgccgaggacgcgaagctgcagctctccaaggacacatacgacgatgacctcgataacctcctggcccagatcggcgatcagtacgcggacctgttcctcgccgcgaagaatctgtctgacgccatcctcctgtcagatatcctcagggtgaacaccgagatcacaaaggccccgctctcggcgtccatgatcaagcgctacgacgagcaccatcaggatctgaccctcctgaaggcgctggtcaggcagcagctcccagagaagtacaaggagatcttcttcgatcagtccaagaatggctacgcgggatacattgatggcggcgctagccaagaggagttctacaagttcatcaagccgatcctggagaagatggatggcacggaggagctcctggtgaagctcaatcgcgaggacctcctgaggaagcagcggaccttcgataacggcagcatcccacaccagatccatctcggcgagctgcatgcaatcctgcgccgccaagaggacttctaccctttcctcaaggataaccgcgagaagatcgagaagatcctgacgttcaggattccttactacgtgggaccactggccaggggcaatagccgcttcgcgtggatgacccgcaagtctgaggagacaatcacgccgtggaacttcgaggaagtggtcgataagggcgccagcgcgcagtctttcatcgagaggatgaccaatttcgacaagaacctgcctaatgagaaggtgctcccgaagcattccctcctgtacgagtacttcaccgtctacaacgagctcacaaaggtgaagtatgtgacggagggcatgaggaagccagccttcctgagcggcgagcagaagaaggcgatcgtggacctcctgttcaagaccaatcggaaggtgacagtcaagcagctcaaggaagactacttcaagaagatcgagtgcttcgattctgtggagatctcaggcgtcgaggaccgcttcaacgcctccctcggcacataccacgatctcctgaagatcatcaaggataaggacttcctggacaacgaggagaatgaggatatcctcgaggacatcgtgctgaccctcacactgttcgaggatcgggagatgatcgaggagcgcctgaagacatacgcccatctcttcgatgacaaggtcatgaagcagctcaagcgcaggcggtacaccggatggggccgcctgtcaaggaagctcatcaatggcatccgggacaagcagtcaggcaagacaatcctcgacttcctgaagtcggatggcttcgcgaaccgcaatttcatgcagctgatccacgatgactctctcaccttcaaggaagacattcagaaggcccaggtgagcggacagggcgactctctgcacgagcatatcgccaacctcgcgggctcaccagcgatcaagaagggcatcctgcagaccgtgaaggtggtcgatgagctcgtgaaggtcatgggcaggcataagcctgagaacatcgtcatcgagatggcccgcgagaatcagaccacacagaagggccagaagaactctcgcgagaggatgaagaggatcgaggaaggcatcaaggagctgggctcacagatcctcaaggagcacccggtggagaacacacagctgcagaatgagaagctctacctgtactacctccagaatggccgcgatatgtatgtggaccaggagctggatatcaacaggctctcggattacgacgtggatcatatcgtccctcagtcgttcctgaaggatgactccatcgacaataaggtgctcacgaggtccgacaagaaccggggcaagtcagataatgtcccgtcggaggaagtggtcaagaagatgaagaactactggcgccagctcctgaatgccaagctgatcacccagcggaagttcgataacctcacaaaggcggagcgcggcggcctctctgagctggacaaggcgggcttcatcaagaggcagctggtggagacacgccagatcacaaagcacgtcgcgcagatcctcgattctcggatgaacaccaagtacgatgagaatgacaagctgatccgcgaggtgaaggtcatcacactgaagtcgaagctcgtgtccgacttcaggaaggatttccagttctacaaggtccgggagatcaacaattaccaccatgcccatgacgcctacctcaatgcggtggtgggcacggcgctgatcaagaagtacccaaagctcgagtccgagttcgtgtacggcgactacaaggtgtacgatgtcaggaagatgatcgccaagtccgagcaggagatcggcaaggccaccgcgaagtacttcttctacagcaacatcatgaatttcttcaagacggagatcaccctggccaatggcgagatccggaagcgccctctcatcgagacgaacggcgagacaggcgagatcgtgtgggacaagggccgcgatttcgcgaccgtgaggaaggtcctctcaatgccgcaggtcaatatcgtcaagaagacagaggtccagacgggcggcttctcaaaggagtcgatcctgccaaagcggaactcggataagctcatcgcccgcaagaaggactgggatccaaagaagtacggcggattcgacagccctaccgtggcctactctgtcctggtggtcgcgaaggtggagaagggcaagtccaagaagctcaagagcgtcaaggagctcctgggcatcacaatcatggagcgctccagcttcgagaagaatccaatcgatttcctcgaggcgaagggctacaaggaagtgaagaaggacctgatcatcaagctccctaagtactctctcttcgagctggagaacggcaggaagcggatgctcgcctcagcgggcgagctccagaagggcaatgagctcgccctgccgtccaagtatgtgaacttcctctacctggcgtcccactacgagaagctcaagggcagcccagaggataacgagcagaagcagctgttcgtcgagcagcacaagcattacctcgacgagatcatcgagcagatctccgagttctccaagcgcgtgatcctcgccgacgcgaatctggataaggtcctcagcgcctacaacaagcaccgcgacaagcctatcagggagcaggcggagaatatcatccatctcttcacgctgaccaacctcggcgccccggccgcgttcaagtacttcgacacgaccatcgatcgcaagaggtacacatctacgaaggaagtgctggatgcgaccctcatccaccagtccatcacgggcctgtacgagacacgcatcgacctcagccagctcggaggtgacaagagacccgcagcaacaaagaaggcagggcaggctaagaagaagaagtgacaattcgctgaaatcaccagtctctctctacaaatctatctctctctattttctccataaataatgtgtgagtagtttcccgataagggaaattagggttcttatagggtttcgctcatgtgttgagcatataagaaacccttagtatgtatttgtatttgtaaaatacttctatcaataaaatttctaattcctaaaaccaaaatccagtactaaaatccagatctcctaaagtccctatagatctttgtcgtgaatataaaccagacacgagacgactaaacctggagcccagacgccgttcgaagctagaagtaccgcttaggcaggaggccgttagggaaaagatgctaaggcagggttggttacgttgactcccccgtaggtttggtttaaatatgatgaagtggacggaaggaaggaggaagacaaggaaggataaggttgcaggccctgtgcaaggtaagaagatggaaatttgatagaggtacgctactatacttatactatacgctaagggaatgcttgtatttataccctataccccctaataaccccttatcaatttaagaaataatccgcataagcccccgcttaaaaattggtatcagagccatgaataggtctatgaccaaaactcaagaggataaaacctcaccaaaatacgaaagagttcttaactctaaagataaaagatctttcaagatcaaaactagttccctcacaccgttaattaacccgggggatcatgaaccaacggcctggctgtatttggtggttgtgtagggagatggggagaagaaaagcccgattctcttcgctgtgatgggctggatgcatgcgggggagcgggaggcccaagtacgtgcacggtgagcggcccacagggcgagtgtgagcgcgagaggcgggaggaacagtttagtaccacattgcccagctaactcgaacgcgaccaacttataaacccgcgcgctgtcgcttgtgtccgtcgatccactcgatgctgttttagagctagaaatagcaagttaaaataaggctagtccgttatcaacttgaaaaagtggcaccgagtcggtgctttttttgtcccttcgaagggcaattctgcagatatccatcacactggcggccgctcgaggtcgacggtatcgatggcgcgccaagcttggcactggccgtcgttttacaacgtcgtgactgggaaaaccctggcgttacccaacttaatcgccttgcagcacatccccctttcgccagctggcgtaatagcgaagaggcccgcaccgatcgcccttcccaacagttgcgcagcctgaatggcgaatgctagagcagcttgagcttggatcagattgtcgtttcccgccttcagtttaaactatcagtgtttgacaggatatattggcgggtaaacctaagagaaaagagcgtttattagaataacggatatttaaaagggcgtgaaaaggtttatccgttcgtccatttgtatgtgcatgccaaccacagggttcccctcgggatcaaagtactttgatccaacccctccgctgctatagtgcagtcggcttctgacgttcagtgcagccgtcttctgaaaacgacatgtcgcacaagtcctaagttacgcgacaggctgccgccctgcccttttcctggcgttttcttgtcgcgtgttttagtcgcataaagtagaatacttgcgactagaaccggagacattacgccatgaacaagagcgccgccgctggcctgctgggctatgcccgcgtcagcaccgacgaccaggacttgaccaaccaacgggccgaactgcacgcggccggctgcaccaagctgttttccgagaagatcaccggcaccaggcgcgaccgcccggagctggccaggatgcttgaccacctacgccctggcgacgttgtgacagtgaccaggctagaccgcctggcccgcagcacccgcgacctactggacattgccgagcgcatccaggaggccggcgcgggcctgcgtagcctggcagagccgtgggccgacaccaccacgccggccggccgcatggtgttgaccgtgttcgccggcattgccgagttcgagcgttccctaatcatcgaccgcacccggagcgggcgcgaggccgccaaggcccgaggcgtgaagtttggcccccgccctaccctcaccccggcacagatcgcgcacgcccgcgagctgatcgaccaggaaggccgcaccgtgaaagaggcggctgcactgcttggcgtgcatcgctcgaccctgtaccgcgcacttgagcgcagcgaggaagtgacgcccaccgaggccaggcggcgcggtgccttccgtgaggacgcattgaccgaggccgacgccctggcggccgccgagaatgaacgccaagaggaacaagcatgaaaccgcaccaggacggccaggacgaaccgtttttcattaccgaagagatcgaggcggagatgatcgcggccgggtacgtgttcgagccgcccgcgcacgtctcaaccgtgcggctgcatgaaatcctggccggtttgtctgatgccaagctggcggcctggccggccagcttggccgctgaagaaaccgagcgccgccgtctaaaaaggtgatgtgtatttgagtaaaacagcttgcgtcatgcggtcgctgcgtatatgatgcgatgagtaaataaacaaatacgcaaggggaacgcatgaaggttatcgctgtacttaaccagaaaggcgggtcaggcaagacgaccatcgcaacccatctagcccgcgccctgcaactcgccggggccgatgttctgttagtcgattccgatccccagggcagtgcccgcgattgggcggccgtgcgggaagatcaaccgctaaccgttgtcggcatcgaccgcccgacgattgaccgcgacgtgaaggccatcggccggcgcgacttcgtagtgatcgacggagcgccccaggcggcggacttggctgtgtccgcgatcaaggcagccgacttcgtgctgattccggtgcagccaagcccttacgacatatgggccaccgccgacctggtggagctggttaagcagcgcattgaggtcacggatggaaggctacaagcggcctttgtcgtgtcgcgggcgatcaaaggcacgcgcatcggcggtgaggttgccgaggcgctggccgggtacgagctgcccattcttgagtcccgtatcacgcagcgcgtgagctacccaggcactgccgccgccggcacaaccgttcttgaatcagaacccgagggcgacgctgcccgcgaggtccaggcgctggccgctgaaattaaatcaaaactcatttgagttaatgaggtaaagagaaaatgagcaaaagcacaaacacgctaagtgccggccgtccgagcgcacgcagcagcaaggctgcaacgttggccagcctggcagacacgccagccatgaagcgggtcaactttcagttgccggcggaggatcacaccaagctgaagatgtacgcggtacgccaaggcaagaccattaccgagctgctatctgaatacatcgcgcagctaccagagtaaatgagcaaatgaataaatgagtagatgaattttagcggctaaaggaggcggcatggaaaatcaagaacaaccaggcaccgacgccgtggaatgccccatgtgtggaggaacgggcggttggccaggcgtaagcggctgggttgtctgccggccctgcaatggcactggaacccccaagcccgaggaatcggcgtgacggtcgcaaaccatccggcccggtacaaatcggcgcggcgctgggtgatgacctggtggagaagttgaaggccgcgcaggccgcccagcggcaacgcatcgaggcagaagcacgccccggtgaatcgtggcaagcggccgctgatcgaatccgcaaagaatcccggcaaccgccggcagccggtgcgccgtcgattaggaagccgcccaagggcgacgagcaaccagattttttcgttccgatgctctatgacgtgggcacccgcgatagtcgcagcatcatggacgtggccgttttccgtctgtcgaagcgtgaccgacgagctggcgaggtgatccgctacgagcttccagacgggcacgtagaggtttccgcagggccggccggcatggccagtgtgtgggattacgacctggtactgatggcggtttcccatctaaccgaatccatgaaccgataccgggaagggaagggagacaagcccggccgcgtgttccgtccacacgttgcggacgtactcaagttctgccggcgagccgatggcggaaagcagaaagacgacctggtagaaacctgcattcggttaaacaccacgcacgttgccatgcagcgtacgaagaaggccaagaacggccgcctggtgacggtatccgagggtgaagccttgattagccgctacaagatcgtaaagagcgaaaccgggcggccggagtacatcgagatcgagctagctgattggatgtaccgcgagatcacagaaggcaagaacccggacgtgctgacggttcaccccgattactttttgatcgatcccggcatcggccgttttctctaccgcctggcacgccgcgccgcaggcaaggcagaagccagatggttgttcaagacgatctacgaacgcagtggcagcgccggagagttcaagaagttctgtttcaccgtgcgcaagctgatcgggtcaaatgacctgccggagtacgatttgaaggaggaggcggggcaggctggcccgatcctagtcatgcgctaccgcaacctgatcgagggcgaagcatccgccggttcctaatgtacggagcagatgctagggcaaattgccctagcaggggaaaaaggtcgaaaaggtctctttcctgtggatagcacgtacattgggaacccaaagccgtacattgggaaccggaacccgtacattgggaacccaaagccgtacattgggaaccggtcacacatgtaagtgactgatataaaagagaaaaaaggcgatttttccgcctaaaactctttaaaacttattaaaactcttaaaacccgcctggcctgtgcataactgtctggccagcgcacagccgaagagctgcaaaaagcgcctacccttcggtcgctgcgctccctacgccccgccgcttcgcgtcggcctatcgcggccgctggccgctcaaaaatggctggcctacggccaggcaatctaccagggcgcggacaagccgcgccgtcgccactcgaccgccggcgcccacatcaaggcaccctgcctcgcgcgtttcggtgatgacggtgaaaacctctgacacatgcagctcccggagacggtcacagcttgtctgtaagcggatgccgggagcagacaagcccgtcagggcgcgtcagcgggtgttggcgggtgtcggggcgcagccatgacccagtcacgtagcgatagcggagtgtatactggcttaactatgcggcatcagagcagattgtactgagagtgcaccatatgcggtgtgaaataccgcacagatgcgtaaggagaaaataccgcatcaggcgctcttccgcttcctcgctcactgactcgctgcgctcggtcgttcggctgcggcgagcggtatcagctcactcaaaggcggtaatacggttatccacagaatcaggggataacgcaggaaagaacatgtgagcaaaaggccagcaaaaggccaggaaccgtaaaaaggccgcgttgctggcgtttttccataggctccgcccccctgacgagcatcacaaaaatcgacgctcaagtcagaggtggcgaaacccgacaggactataaagataccaggcgtttccccctggaagctccctcgtgcgctctcctgttccgaccctgccgcttaccggatacctgtccgcctttctcccttcgggaagcgtggcgctttctcatagctcacgctgtaggtatctcagttcggtgtaggtcgttcgctccaagctgggctgtgtgcacgaaccccccgttcagcccgaccgctgcgccttatccggtaactatcgtcttgagtccaacccggtaagacacgacttatcgccactggcagcagccactggtaacaggattagcagagcgaggtatgtaggcggtgctacagagttcttgaagtggtggcctaactacggctacactagaaggacagtatttggtatctgcgctctgctgaagccagttaccttcggaaaaagagttggtagctcttgatccggcaaacaaaccaccgctggtagcggtggtttttttgtttgcaagcagcagattacgcgcagaaaaaaaggatctcaagaagatcctttgatcttttctacggggtctgacgctcagtggaacgaaaactcacgttaagggattttggtcatgcattctaggtactaaaacaattcatccagtaaaatataatattttattttctcccaatcaggcttgatccccagtaagtcaaaaaatagctcgacatactgttcttccccgatatcctccctgatcgaccggacgcagaaggcaatgtcataccacttgtccgccctgccgcttctcccaagatcaataaagccacttactttgccatctttcacaaagatgttgctgtctcccaggtcgccgtgggaaaagacaagttcctcttcgggcttttccgtctttaaaaaatcatacagctcgcgcggatctttaaatggagtgtcttcttcccagttttcgcaatccacatcggccagatcgttattcagtaagtaatccaattcggctaagcggctgtctaagctattcgtatagggacaatccgatatgtcgatggagtgaaagagcctgatgcactccgcatacagctcgataatcttttcagggctttgttcatcttcatactcttccgagcaaaggacgccatcggcctcactcatgagcagattgctccagccatcatgccgttcaaagtgcaggacctttggaacaggcagctttccttccagccatagcatcatgtccttttcccgttccacatcataggtggtccctttataccggctgtccgtcatttttaaatataggttttcattttctcccaccagcttatataccttagcaggagacattccttccgtatcttttacgcagcggtatttttcgatcagttttttcaattccggtgatattctcattttagccatttattatttccttcctcttttctacagtatttaaagataccccaagaagctaattataacaagacgaactccaattcactgttccttgcattctaaaaccttaaataccagaaaacagctttttcaaagttgttttcaaagttggcgtataacatagtatcgacggagccgattttgaaaccgcggtgatcacaggcagcaacgctctgtcatcgttacaatcaacatgctaccctccgcgagatcatccgtgtttcaaacccggcagcttagttgccgttcttccgaatagcatcggtaacatgagcaaagtctgccgccttacaacggctctcccgctgacgccgtcccggactgatgggctgcctgtatcgagtggtgattttgtgccgagctgccggtcggggagctgttggctggctggtggcaggatatattgtggtgtaaacaaattgacgcttagacaacttaataacacattgcggacgtttttaatgtactgaattaacgccgaattaattcgggggatctggattttagtactggattttggttttaggaattagaaattttattgatagaagtattttacaaatacaaatacatactaagggtttcttatatgctcaacacatgagcgaaaccctataggaaccctaattcccttatctgggaactactcacacattattatggagaaactcgagggatcccggtcggcatctactctattcctttgccctcggacgagtgctggggcgtcggtttccactatcggcgagtacttctacacagccatcggtccagacggccgcgcttctgcgggcgatttgtgtacgcccgacagtcccggctccggatcggacgattgcgtcgcatcgaccctgcgcccaagctgcatcatcgaaattgccgtcaaccaagctctgatagagttggtcaagaccaatgcggagcatatacgcccggagccgcggcgatcctgcaagctccggatgcctccgctcgaagtagcgcgtctgctgctccatacaagccaaccacggcctccagaagaagatgttggcgacctcgtattgggaatccccgaacatcgcctcgctccagtcaatgaccgctgttatgcggccattgtccgtcaggacattgttggagccgaaatccgcgtgcacgaggtgccggacttcggggcagtcctcggcccaaagcatcagctcatcgagagcctgcgcgacggacgcactgacggtgtcgtccatcacagtttgccagtgatacacatggggatcagcaatcgcgcatatgaaatcacgccatgtagtgtattgaccgattccttgcggtccgaatgggccgaacccgctcgtctggctaagatcggccgcagcgatcgcatccatggcctccgcgaccggctgcagttatcatcatcatcatagacacacgaaataaagtaatcagattatcagttaaagctatgtaatatttacaccataaccaatcaattaaaaaatagatcagtttaaagaaagatcaaagctcaaaaaaataaaaagagaaaagggtcctaaccaagaaaatgaaggagaaaaactagaaatttacctgcagaacagcgggcagttcggtttcaggcaggtcttgcaacgtgacaccctgtgcacggcgggagatgcaataggtcaggctctcgctgaattccccaatgtcaagcacttccggaatcgggagcgcggccgatgcaaagtgccgataaacataacgatctttgtagaaaccatcggcgcagctatttacccgcaggacatatccacgccctcctacatcgaagctgaaagcacgagattcttcgccctccgagagctgcatcaggtcggagacgctgtcgaacttttcgatcagaaacttctcgacagacgtcgcggtgagttcaggctttttcatggtagaggagctcgccgcttggtatctgcattacaatgaaatgagcaaagactatgtgagtaacactggtcaacactagggagaaggcatcgagcaagatacgtatgtaaagagaagcaatatagtgtcagttggtagatactagataccatcaggaggtaaggagagcaacaaaaaggaaactctttatttttaaattttgttacaacaaacaagcagatcaatgcatcaaaatactgtcagtacttatttcttcagacaacaatatttaaaacaagtgcatctgatcttgacttatggtcacaataaaggagcagagataaacatcaaaatttcgtcatttatatttattccttcaggcgttaacaatttaacagcacacaaacaaaaacagaataggaatatctaattttggcaaataataagctctgcagacgaacaaattattatagtatcgcctataatatgaatccctatactattgacccatgtagtatgaagcctgtgcctaaattaacagcaaacttctgaatccaagtgccctataacaccaacatgtgcttaaataaataccgctaagcaccaaattacacatttctcgtattgctgtgtaggttctatcttcgtttcgtactaccatgtccctatattttgctgctacaaaggacggcaagtaatcagcacaggcagaacacgatttcagagtgtaattctagatccagctaaaccactctcagcaatcaccacacaagagagcattcagagaaacgtggcagtaacaaaggcagagggcggagtgagcgcgtaccgaagacggtagatctctcgagagagatagatttgtagagagagactggtgatttcagcgtgtcctctccaaatgaaatgaacttccttatatagaggaaggtcttgcgaaggatagtgggattgtgcgtcatcccttacgtcagtggagatatcacatcaatccacttgctttgaagacgtggttggaacgtcttctttttccacgatgctcctcgtgggtgggggtccatctttgggaccactgtcggcagaggcatcttgaacgatagcctttcctttatcgcaatgatggcatttgtaggtgccaccttccttttctactgtccttttgatgaagtgacagatagctgggcaatggaatccgaggaggtttcccgatattaccctttgttgaaaagtctcaatagccctttggtcttctgagactgtatctttgatattcttggagtagacgagagtgtcgtgctccaccatgttatcacatcaatccacttgctttgaagacgtggttggaacgtcttctttttccacgatgctcctcgtgggtgggggtccatctttgggaccactgtcggcagaggcatcttgaacgatagcctttcctttatcgcaatgatggcatttgtaggtgccaccttccttttctactgtccttttgatgaagtgacagatagctgggcaatggaatccgaggaggtttcccgatattaccctttgttgaaaagtctcaatagccctttggtcttctgagactgtatctttgatattcttggagtagacgagagtgtcgtgctccaccatgttggcaagctgctctagccaatacgcaaaccgcctctccccgcgcgttggccgattcattaatgcagctggcacgacaggtttcccgactggaaagcgggcagtgagcgcaacgcaattaatgtgagttagctcactcattaggcaccccaggctttacactttatgcttccggctcgtatgttgtgtggaattgtgagcggataacaatttcacacaggaaacagctatgaccatgattacgaattcgagctcggtacc

SEQ ID NO: 27 - DNA, 3839 bp, Oryza sativa
gtcaacatgatgtcagcgtccgatttacgtgcaaaactactttaaactgaattttctcttcaattacttatcaaaatcatgatccaattgcaccattaaattcgttgcaattaaatcttcaaaataagaccacacatggatatattccgatgaaaaaaattagcttattattgaattatttttaaatattgcacgatgtttcaccagatatatcggaattgtttcactaagtagatcgaaaatgtttcactcgtttaaattgggtgttgtttcacctcatataaaaacaatgtttcagcaaatagcgaaataatatttcagttcactgtaacattagatctatacatagtaaaatattgtgagtatactaggtgaaacattgtgagtacactaggtgaaacatttttcggtagaataaaaaataaaccaaattcccttaatagagagtttttaaaatatgtgggtttttttttgcaaaaaagtattttaattcattgcaacattagatctataaatagtaaaacattataagtacactaggtgaaacatcttttgtgaaaaaaaagaagaagtgggtgggcccaacaatacgcacgtggggggaggggcgcgcgggggagcgcccgatccggctccccccgcgccggtcgcccgacgtaaagtattttcgatgtttgattagtactacctccattccgatataagtgtagttctgggtttcatattttttttcaaataagacggacagttaaacattggacacggaaacccacatcacatttggaggtggtaaagttgacaagagtcatgtatatcgacacctgcagttgctgatttggcgacgccacattcacggtaataaggtggtaacacgcgtagaggatccggcggaggtgaaaaaaaaaacaaagcgggggaaggggcattgcgttgcggcaacacggaggcgccagcggcccatgtaattggaacacccagtggcccgggatggaacggagcaccaaccaaccacacgctgccgcgcatcgcatcggcatcccccgggaagaggagagagagatagatagatccattcgggacgacgagacgacacacttacaacggccgcctcggtctccctctcctcctccctatataacctcctcgcccccgctcgcgcgatcgatcattggacatttgttctcagcttcagctcggcccccgtcttctcatcaccagctcagctgtggccggccgcgcgcgatccaagttgctagctagctaagcttttgtaactgagagtgagctagctaggtagctgggtattgggtattatattgcgagagatagagagagatgagctgcaacgggtgccgcgtgctgcggaaggggtgcagcgacgcgtgcgtgctgcggccgagcatcgagtggatcgacggcgcgcagccgcaggccaacgccaccgtcttcgtcgccaagttcttcggccgcgccggcctcgtcgcctccctcgccgccgtccctctccaccatcgtccaggtatatacccttcgatcgattccatcgctcctcatctccccttaattaaggcctaccttaactcttaatttcttgcctccatttcgagctaattattgtgtccgcaaacttaactaggtacagtagtggtaaattacgaggttacaaatctaatgttcgttgtgtactttgtaatttaagcaattctcagatatcggtttctgaaaacagtccagacaatcaatcacagttaagctgtcaattactgtgtttggaaatacagtgcaagttctcggtttactagctctaattaagtcgttgcttataattagcttagaggccgggcttgttcatcggtcacaattagtacacctctatcatgtagtagttgcagtaaattactccacttgttaaggaaaaaggctagaaattaactagaaaaaaatattttctcaggttttatctagatgaacaattagtgcagaaagacttgtgactactagagctgacctaacaccaaagatggagtcgtgataccagtacttatatatatatatatatatatatatatatatatatatatatatatatatatatagtaaatttgtttggtgctccatggtgcccgggcaccattgttgaaattgagtatatacccaattcaaatgagcatgaaactttttcaattatttaggtattaatattaactactttactaactagttgaaagcaagtttgaactgaatttgaacttgtttttgttagattttgattctaggtatatagcatccatacatataattagttaggtatgtaatcatggattgtgaaataaagttaaatttgagttgttttgttgataggtataggtatgaattgaattcttataactaggtatatactcacaatttgaaaattttaaaaaatttgagtgattttgtgcatttgaaaccatggtgcccgggcaccatggtgccccatatgagtgtcctatatatatatatatatatatatatatatatatatttggtgttcccttttaatttggatgttatgcggccttccgacgcctccaggggacaatccgaatagagaatctttttcagccatgtccccaactgtacttcaccaaactaaactcctcttcagagactcctagtgccaagagatatgttagtttagttgacagtttctttcttttgtttgtttagagcccaattggcgtagtttgctttcggcttttgtcatcaggtcaattggtatcttttgatcctcacactgaaatgaacctagattattactctgcattaacacaataaacaaacacagaaacatatttattaatattatcggtatttctgaagttatttttagaattagagatttgctctggtccaataaaaagtatctcgaggtaccggtacttacacagtactagattgcttccaatggttggttctaggccaatgaatttttgttggatcctgcctagctaaacaatttactaccgtgaggtaccggtatctcgaggaacttttttttgaaccagagcaaatctcttagaagtaggtaaatgaatttttgccaaatacatcaaaattgaactgaattaattcctgtgaactgatctctgaataaattgtttgtagacaatttatgatgtccagataaatcatgaggttgaaattggtgaagtaggaaccacttgatagattaggcatatattaattcctgattgaaacttgggtggttaatctctgaatttaaatttaaatggatgaatatattgacgtgtgaagttgtgttgcttggatggatggatgcagcgctgttccggtcgcttctgtacgaggcgtgcgggcggacgataaacccggtgagcggcgccatcgggctcatgtggacgggcaactgggacctctgccaggccgccgccgacgccgtcctccgcggcgactccctccgcgccctctcggccgtgccagccgccttcaccgaccgcgacatggccggcctctacggcaacgtcggcgccgccgccgggacctcctcctcctcgcccgacaacgacaactcctccgcctccgccgcgccccggaggaagcggcccaggaataacggcgccggcgccggcgtcggtcagcagcagctgccgcacgcggtggctgcggtgctccagtcctgcgagctggacctctgcctcacgcccgtctcaccgccggccgtgcagctggtgggtgggggcggcggcgcgtcggacgagcactcgacgacgacgtgcgaggaagccagcgacggggatggcgccggggcgcccacgctgctgaacctcttcagctga

SEQ ID NO: 28 - DNA, 3237 bp, Zea mays
ctctccaataaactgtacaagacagacagcgatagctcccgggattgaacgggcgggccgcgggcggttctgtggcccccgagccccgaccgcgccggcctgcttgtaaagctctcgttgccttgttggcttggttgccgtcgacgggtgggcggcgatgagccatgcgctgcgacggtggggtggggtgtggtgtggtgtggtgcatatttttattcagaccacaagcaagaaagaaagaaagggtggccgaggccagggccgggaccgggaaaattaaacccgggagcgcgcggcgcggcgaggactgaaaaggatgtgaatctgatgcggcaaggaggcggtgccgccacggattccgttccgttccgttccgcggcgtacgtcacgccgcaccaccggcacacacacgcacgcctgccactcgctctctctctctctcatcacagttccacacccactgacccaccctcgagccgtccgaccgaattaacaacgtactgcgctcgatgcgaaggcgctgatcgaggtcttggccagccagcctccgagcaagttgcggcttggtaggaccagcagtagctgctggctccatatgtatgagatgggaagaaacaaaagaaaaacgcagcgagatggccgaaaggcaaccgccggcaagttgcatgcgagcaggactaggacctgcggcgtgcgtgatgagcgcgccaggtacgtggtgggaggcgccaacgaccgaggagcgaggatacgtacgatgcagaggtgagctgggggggggggggggggggggggtgaagggccgggagagagagggtggctccggggggccggggccggtttgaggtggcggcgatggcaacgccagccagcgagcgacctcagcccttggaggcagccaaggggcggcggccccatcttattcatatctatctctgcatatatattttttaaacaattttggaccatgccccacccgcaccgcgcgcgtcgctttccggcgccttgccttgcccttgagtcgtctgctctgctcactcctcctccgcctttgttcctatccattcacatcctcctgtccttccgcggcccagagccccgccaaaacggccgcactgacatgctcggatcctctgcagctgcgtccgtgtgttaccctttctcccctcatggcgtggcaggtccagcaagacgccgggagatgggatcagagcacggaggatcctgtaggggacgcgacaatggggggcagacagtggggtgttgcggcaacacgtaggcgccaaccgccaaagtcattggagcacaacccccaatttctccttcctcgaatcgaaccttttaattgtgcctcctggtgcgggtgcctcttcctcttcctcttgctctttgctccagcctccagctagcttcgtctatataagcaaccagccatcagccttccttctctcctagctagctactagtacctgtcctgctgtccttcacatacatctatccatcggtttctcagctgctgctgcatacacacctcggccgccgccatcgtcgtcgcctagctagctctgctcctgggtcgtgcgcctccatcgccgtacgttcgatcgagcacagcacggccggccggtgggcgcacgcgcacgcgttagcttatactacattaaacgtacgagactgcaggagctagcgagcaacggcgtgccgatcgatcgatcgacagagcggggcagatcgatgagctgcaacggctgccgcgtcctgcgcaagggctgcagcgacgcctgcgtgctccgccccagcatcgactggatccacggcgcgcagccgcaggccaacgccaccgtcttcgtcgccaagttcttcggccgcgccggcctcgtcgcctccctcgccgcagtcccgctgcaccaccgcccaggtaattaatgcatgcatgcatgccgtccaccacacgtctacaccccggcccggccctatatgttgcaagattatcgttactcacacgtatacatagatagataaatagatataggtcctgtttggcacagctactgcttgttgaaaaagcagcttatctgataagctggtgaaaagcagcttctgcttgttggctgtttttagtgtattctgagaagcagctgaactgataagctactgcagaagctagctgtttggcaaaacttctgcttaaatttgtgaagaagctgaaaataagctgtaccaaacagggccatagttaggtgacgttttttttaccactataggagcttaggttatgttatctatagaccaacaattttatattatcttgaagaagagaacaacatgacctattgacacagcagcagcagcagctaccaaaatgttttctttatggcgctagctacgcggcctttcgacgctctcatgggacaaaaataaagaaaaaggtcgtcacccactcacccgtcacagatatgctacataattattgggatctaattctactattactataattccaacccctttttttggttagcggtaatattttttatttaccaacagcgcgcaccagtactaataataacatcatcgtcgtcttcaagttctgacttggaaccatgcatgcgactcctactaacgtaaccatgctggaactgtgcggacaaacaatacaatgcagccctcttccggtccctgctgtacgaggcctgcgggcggaccatcaacccggtgagcggcgccatcgggctcatgtggacgggcaactgggacctgtgccaggccgccgcggacgccgtgctccgcggcgagtcgctgcgcgcgctctccgccgtccccgccgcgttcacggaccgcgacatggacgggctctacggcagcgtcggcggcctggtcgccgccgccgccgccgccgcgtcgcccgagaactcctcctcctccgcgccgtccacaacgaagcgcaggaacgcgaacggcggctccagcaacaacgccgtccctgcggccgcggcctctcaccaccgcccgccgccgccggctgctgccgctgctgggctgctgctgcagtcgtcgtgccaccagctcgacctctgcctgacgccagcgctgtcgccgccgggcgccgggccgcggggctgcgccgccggcgcgtccgacgagtactcggccacgaccacgtgcgaggaccagaccggtgatcacggacacggagagcccaggcctcccccgccgctgctaaacctcttcaactga

SEQ ID NO: 29 - DNA, 1272 bp, Glycine max
actcaaggatgggaaagaacgtcggaaggatgaggaggtgaatgaattattgttatgacatttcacgagatttttttatgtcaaattttatctttttttagttggatttgtttcttttttaaaataggatcaattaagatttgattttttttctaacctgttaattaagatagggaaataaatttttaatttaaatttgattttttttctgatgttgcagtcgttttactctaaattttttcaacaattaatacaatgatatattttatgtatatctcttttatctttcctatcatttattacatttgaaattcaattttttctctcttttctctctcatagtggtatatttagttgtataagtattatttctttttttattattaggtaacaatgtaaaaacttaattttgtattaacgaattcattcattaaattctcatccatttatggttgtataactttatatatatcattttcactgaaatcaaccaaattcaacacataaaggattagattttttaaatatgttcacagaattttgattttttgattgtggtatgaaaaagactttattattattattattattgaaaagacaaaatccattttttattatccagagataatctcattactttcaaatataaaaatatcttactttcagaacaaaaaatctctctcactaaatatatataactttacaacaattataattataataaaaatttacaaattctataatccatacttacaataatacagaagatgtttgaaatatgaatgtattcccactaagatgttaaataaaataatcgacattagcagctgtgaaatgtatagaatccaacggcgtaggaaacatccatgcgcggaaacacggagccgctcacgccaaagacattggaatctcacccttatgcaaacagaaaatgtcagtgtgccccgcagaattaaacacacacacgcactctcgcttcctcacatctctctcccactatatcttaacccaaccatagttaaccaccaaccccacttcccccaacacctgctctcccctccctttatttatatcccacccaaactaccatttgcattctctctctctctctcttagatagctaaatttttcattagtattccttgtaggccacctagctttcctctcttcttactatttttgtgttcatgtgaaggttaattgaaacataaagacacactcacacaccctgggttcataaatttcattttgcagtaacaacaaaaaataagc

SEQ ID NO: 30 - DNA, 1145 bp, Brassica napus
agagacactcccggcggtggcgaggagcgccaaccgccggaaaaacaagaaaagattgaacggcggtgttctttagtcaagagaaaatcctcttaaagtctcttagagcatgattaacccgagttcttaatttggagtactcaactcatgatttgacactttattgttttttttttacacttttcggctaaaaaccgacttttatatcttttatttaaaagacagttcttagctttttttagttaaaaactaagaaacggttcttagccgaagctaagaaacggttcttagccgaagctaagaaacggttcttagccgaagctaagaaccccattctaagagtccgggttaatcatggtcttaaagcaaactccaacggtagaatcccaatcggagttgctctcaaataaccaggtatggaagccaattatcgcccttttgcaaatttcatcgattacttcaccaattattgccctattgcaaatttcatcgattactttacctatgattaccctcgcttactatgataaagaatgattagtggattcctaacccgttgggaaaaggactcgtaaaaatatttttttaaatgaatggctgagagaagacacgactttttgcggagacatggtgccgctcacacccatcatcttggaatcttgactaccctctctctctcaaagggtaacttcataataacgttttaaaacacatacagattattaaaatgtaactattactatttctttggggacaaagagcagtagttaatttttcaaaaaattatataaaatatggggttaggttaagaatcttctacggcggcgagcctcacgcacaaggacgcttgccttcctaagttatatgtctcttagctctttattattcaatttttttcttttaaatcccaacttgggtttttaatatatagtatttatgtgtatatatatatggtcgtctatcttcagaaacatataatctatctttctttctgtgcaaacatcactttcttgctcccaaagcaaatcttcttcttcttcctttgagattctccaagacatcagcaacaactggacagactctgtcggaaagagaattaaaagtaaaaaaaaaaagtcacaaaactcagcaaagaaaaataaaga

SEQ ID NO: 31 - DNA, 1156 bp, Camelina sativa
catgaacaaatatcaaagctaggtgattagtgggaataggggggggggggcaaaaacacgcatctatgcctcttgtattgcatagcatgtgaccttatagatttcacatcaaaagttgtcatgattatagcaattaccaaatcattaagcaaatatggaagcaattattgacgtcctttttgctagcaaaaatcaatcgattactactcttaattaccctaatcaactaaataaagttgaatgattaatggtttaggaacccgttgagaaaatgacccatatatatatttttgaacaaataggaagctccaattttacttcacagttgtcatcaactgcaagctgtggataatgtcgacgcatctatttctttttttttggggattataattatgaagttgaaaaaaactaacggcagagagaagacataacttttcgcggaaacacggagccgctcgcacccatcatcttggaatctttttaccactctctctaaggtgtcacttcacaaaacattacccaatcataaaaatattgttttttgtttaaatacgtttttttttcgtaaaaaaaataaaattgtagtcattgataattatagtttttaaaatttaattggtgtaagtgtaaggttcttctacggcggcgagcctcacgcaccaataggcttctggcttcccgtaccctatgtctctttattactcccttctttttaaaatataagatgttttagaaaagttttttgtttcataatatatgatgtttttaagtttctatgcaacttttagattagtttaatattttatgttatgtagtattgtttttgattggtagaacatattaaaagtaaagaattcttaatgtacgtgtgggttaaacggaatcagtaatttattattccaaattaaaaaaataccaatttggattataatataaagtttaaacgtataaatgtgtgtatatatataagtggtcttctctatcttcacaaacatttttagtttctctctcaatttcgttcttgctcccaaagcttctatcaaaatcttcattctccagaccctcaggaacattcaggagaaaacacagaatttaaacaacaaagagcaaaaccaaatttattttaattttttttgagaatcggaaaaaaaaaaaa

SEQ ID NO: 32 - DNA, 1357 bp, Sorghum bicolor
tgtacccacaatttatcaacgtctaaacgcttatcagttgtagcggtatatagccacacagagaggggctatcaattgtacgacgtgcagaatttgtggataggaaccggagacgacatctaaacgtacgcttatcacgcgtcgtgctcggcagcgaggtgtcgtgactagggtgggcaggggtgggtggcgtggcgaggcggccagtggtacggtaggggtaggatgaggacacgactggggaaggtcgcggcggaggttgggggtgggcggggccgagaggtggggtggcgcgaccaatggcgaggtagtcacggctagggcaagggaggcagggtacatgtgtcgctagctaggaagaagacgcgtggagctaggtcgtgcaataactctgaccttgaaaaaaaaagtaagatgcaatgcaagtcatctagattcctgaatgctgattgagtataaagaaaaatgatttcacaatgagccactagctacaatgaatagaaatggtgctgttctcacaaaactaacccacatttgcatggacatcgatggtagtacgtggttgttgtgcgcttaatttcaagtatcgatccccagctagcatcggtgtattaggcggcgttggcatattttctttgagagcatatcgattacaccttggtcagcgtctaataaggagcatggacggataggagtagtgttacctgcgtagaggatcctggggagagggcgcgcgacaatgggagcagacagggggatgttgcggcaacacggaggcgcgccaataaccgccaatgtcattggagcggaacggaaccctgcccaataatttctccgcagctgccttgttcagcgtttatttgtgccccctgccactccggagggaccgccggccgcctcgatctcttgctcttcttcctctgccttcgtcttcctctggctctatataagcaaccaaccaccagctagctgccttctctcctagttctccaagcttctcgcatggatcgatcgatcagttaattgttagctagctgtagctgctgcatagagacatcacctcgccatcggcaagctagctagctaccgatcgattggctgctagctagtagctagctgctccgatatatccttcatcacacgccgccattgccgacagcttgcggcgttcgagcagcacacggccggccggccggccggtggtcgttggcttcgatagttatatattcagtcgttattagcagcttatatatatcgagacaggagcaagcagagctagaagcgaattgaaaaaaggcgaaagagatcgagagcttgaagacgaagatccaagagcgggccgggccgggatagatag

SEQ ID NO: 33 - DNA, 1776 bp, Medicago truncatula
aaatattgtagtaatttatttttttataaattggtttttatctcagttatcaagtgacgagaataagaatgagggtggaatggaaactaataaagattgatctaaatcttgtatattgaaatataaaataaaaaaacccttataaatctcctctaggaaaagaaaaaaaaatactcctacaaattgcaacaacaggtatataattaatgaatatttactttctaataatattgtatgccattcaaaaaataaggtggagtactatataataaattagaaacaccaacaaccaatgcttatttactcttctttttatgacagaagaatcaatatagtagaatgtttgaaatataaatgaattctgttttatggaggaaaaaaaatcataaaaaactatttatagagtgtttgaagttacaaatatttgattagagtatattgggcgcacattgacgaatctcgttaataaatattgaatttcatgcgatcacattattatattatatatatatatatatacatgtcaccataattttatcaaatttccaatcaatccaaacatccacactcaagttaattatgtaggagtaattaattattgaagctaaaaagattaggacacaaaattacaatgaacaaaactaattgatgagaaataaagttagtatgcatctacggtggtccaatttagtgaataaagtaaaatttgatggtgggagagaaatgtgaagggaattatctccaagtgaagtgtggaaaaattcccaacatttgcggagaacctgagttgcagccctaacaacatgaccctaccctacccaatatatttgtaacttaaccatggtttgaatatatacactataatattagtactattattaaaaaatgaacaaatgttgattagttgatgatgcatgcatgattccccacacacacgcactcctacttttcaccactatattatgcataataattaagttttctttcttcacatgattaactaaaacctgcaagatataagaccatacagtgttacatttatctatctagtagtaaattgaagatatatatatatataataaaatgagttgcaacggttgccgagttttgagaaagggatgcagtgaggattgcatgttacgagattgtctaacgtggatacaaaatccacaagcacaggctaacgccactgtctttgtcaccaagttctttggccgtgccaccctcatgtctttcctttcacctgttcatcccaaccaaagatcatgtatatatatatatatatatactactcggataaataaaagttgatgtatctggttcaaaagaatatacaaatttctaacatgtattaattaattcaattatattacaggtttgttccagtcgcttatgtatgaagctgttgggagaactataaatccagtaaatggagcagttgggctgttatggactggaaagtggcaattctgtcaacttggtgttgaacaagtgctgagaggtaacggcggcgcgttgacggcactccctgatcagttgttaggtgtggatcatgatagtagttcaattcatcatcaatatcaccaacagcaatctgggttgatgtcatactctagagtggtgaaaaaccaagcagaaaagcaacgtgcggggacacatgagtcagaggaatcggagtcttccacgttgggaagtagaacaagaacagaagattgttcttatgtttatgctaattctcaaactcaaaggaaccaactccttacactattcttatga

SEQ ID NO: 34 - DNA, 3051 bp, Triticum aestivum
tttactcgaccctaacatagagacaaccctatggcattgcaatgtaaggtcaagaaaaggatccgaccgcttatgcggtgttaatatacacaacgagggctacttttttagagccatgattcgagccttggtcgatagccccactccaggaggtctttacaaccgtgctagagagtgcatgtctatttttcaacattttgcaactaacaaatactctagtaaacaaaactgggtgtcaagactgtttaatatccaagacaacaatgcctaggtgggctgtgtagggaaactatgagcggcacatcgattaatgcataaaaatcttatactccctccaattcatattaattgtccgctaacttagtacttcctccatccggaaaaacttgtccgagaaatggagtccggacagagggagtataactttagccagatggaggacttaagatatttagttaaattggcaaactgcttccttggctcagaaatacatacaataattactattcaaaaaaagtaaagacaataatttgatagtccaatccaagttttagccacgtctgtttgagcgaattaatatgcatcaagttacacaaatacacgtttagcgcagtgaagtagggtgggtcatcgtcctagcactcgatgacaaagggctacggttttagtacaaaaatgtttagtcgtataggctgttaaaggtttctacaggctcgttccaaactttctaaacacccccacccccctccccccgatttcaatggaggtgggtgggctcgtgcctctactaatgaccaattaaaaaccgccacaacaccttgtaaacccctcgtccctgtaacatcttacgtgtagcaaagctcgtttgagcatgtgggcacagagctagcaagcggtgagcacgcgtagaagatcccgtgaaagcagagactggtgcggaccgaggccatcgcggcaacacgggggcgccaaccgcccaatgtcattggaaccccgcagcaccaaccaaatatttctcctcctcgagcccgcggcccccagcctcccacttgggcgcatctatacatatttccatttccacaggccaagcaggaaggaagcatcgcccctcctctatataagcgccccggcagtctccgctctcctctgctactccctaccaggctaccactcctcctctccgccgcatatcgacaccgacagacggacgtccagtttagcagcaagatctgcagcacgtactccgccagctcaaccaccgcgcacctccggcgtacggcggccgatacggtgatcgactgtccaggctccatccgtcgatcgacggagtgccgcgccgttggttgatccgtcgagatgagctgcaacgggtgccgcgtgctgcgcaaggggtgcagcgacgcctgcgtgctgcggcccagcatcgagtggatcgacggcgcccagccgcaggccaacgccaccgtcttcgtcgccaagttcttcggccgcgccggcctcgtcgcctccctcgccgccgtcccgctccaccaccgcccaggtacttaccaccatctcgctcgctaccttacttttaacgcaattcttcatccagtagagtagtggcagatatttggaagggcagatgggctgtcaagaacgcggagaacgcaaaacagctcttcaggctacgcgagggccggccggcgttgtcgatcacagtcgcgattagtttagtgcactacagtacaatcttatcttatcttacctccgctagctatggctaactttacctcggtgatcagtacaactagctagctagcgcgcggccacctgtacgaaaagttaaaaacccatcgccttggtttcgtctcggtgaacaatgttacccacgcagccgggctatagcttagacatgacctatctatgaaggcagtgttatagtagattattttaagcgttcttttggacggtacgcggccttccgacgcccccatgggtcagactggctaaaggagagaatctttttagccacgctcccaattgcgctttgccaaacacagaaatccttaattaaaagtgctgggagatatgctaattaatcatggcgattgccctccgacctctgtcgagaggtcaattcatatcttttgccccttcggcgctgaatcgtccacccatgcattcctacagactcgcatagtccggacaacatttcaggatttctagaatcttcggttgataaatagccatgatacttaggctgcccataatgagagtatcgtaggtagtatcatgcatgccaattaagcaattttgatgtagtaacataaaattaaataaagaaaaagagtcttgagtatcatatcatgataccgtatcatattaaatgatgtgctattttgtgtcatgcatgacaataaatgttggtattaggaatgtagtattatagactagtatcatatgcatgatactaatatatgatactccccattccggcataattatatgttagggttattgggtgattaacgtgtggtgtcatttggtgcagccttgttccggtcgcttctgtacgaggcgtgtgggcggacgatcaacccggtgagcggcgccatcgggctcatgtggaccagcaactgggacctctgccaggccgccgccgaggccgtgctgcgcggcgactccctgcgctcgctctccgccgtgcccgccgccttcacggagcgcgacatggccggcctctacggcaacgtcggcaccaacaccggcagctcctcctccctccactcctcgccggacaactccacgtccgcgcccgccaggaagcggagcaagaacagccccggctgcggcgccgtaggagggcagcagcaggtgaagctgccggggccggggccggtgctgcagtcgtgcgagctggacctctgcctgacgcccttgtcgtcgccgctggccggcgggaggcgaggcggcgcgtcggacgagtactccaccacgacgtgctgcgaggaagccagcggcgacgcggcggaggccggggcgcccccgctgctgaacctcttcaactga

SEQ ID NO: 35 - DNA, 267 bp, Zea mays
atgtctgggtccaggagctcttcgtctcacaacgttaccattgattccgagtggagcaaaaaggagaacaagctgttcgaggaggccctagcctgctacggcgcgggcacacccgaccgctggcacaaggtggcccgtgccatgggtggcatcaagacagccgacgaggttcgccgccatcacgagatccttaatgaggatgtcacgctcatcgaatccggcagagttccattccccaactacaacacgcagggagcttggaactaa

SEQ ID NO: 36 - DNA, 264 bp, Zea mays
atgtctgcctcgcggagctcctctcccaactccatgtcacagtggagccagaaagagaacaagatgtttgaagaggcactcgcctactatggcgagggcacacccaaccggtgggacaaggtgtccagcgccatgggaggcatcaagtctgccgaggaggtgcgctgccactatgaaaatcttgattacgacgtcaagatgattgagtcaggcaatgtgccgtaccccaagtacaagacacagggattctggacccgaggttaa

SEQ ID NO: 37 - DNA, 291 bp, Zea mays
atgggttcgtcctggaccgagagtcaaaacaatctcttcgagcgtgcgctggcagtatatgacaaggacacaccagaccgctggcacaacgttgcgcgggcagtcggctgcggcaagacagccgaggacgtgaagaggcactacaagtacctgaagacggacgtgaagcacatcgaaaccgaagaaggcggccgaggatcccagtccagcagccctgctggtgctggtgctggtggcagtggaagcagcagcagcagttcttggggcagggacaacggtgacaagaggtag

SEQ ID NO: 38 - DNA, 1233 bp, Zea mays
atggagcgcgtcttctccatggaggagatccccaacccctactgggccccgccgcaccctcaaccggcggccggcggcgctgttgctgcaccaggtggagtaggaggagcgggggacgcggcgggcgcgatgaaccggtgcccatctgagtggtacttccagaagttcctcgaggaggccgtgctcgacagtccgggtcccgtcgccggcgtgggtagaagcagcggacaagctggagttgaggcggcggagagcaagccgctgggcgccgcggcgccggcgtccgtctcgagctcggtcgttgaccccgtcgagtacaacgcgatgctcaagcagaagctggagaaggacctcgctgccatcgctatgtggagggcttctggtgcagcacctccagatctttctgcgactgctgcttccttgccaagtgtcggtgctccgcatgcagctcctcttaaacccgtcggaggtactgaaagtctagttcaaaacatgctagctggtgctccagtaggggggtcaggtccacatgtagtacaaattgctgatatccctgttaagcaaaccactagctcttcctcacgagagcagtcagatgatgatgacatggaaggcgatgctgagacaaatggaaatggaaaccctgttcaacaaagacaacagagaaggaagcaatccaaccgggaatcagccaggcgttcgagaagcagaaaggcggctcacttgaatgaactggaggcacaggtagcacaattaagagtcgaaaactcttcgctgctaaggcggcttgctgatgttaaccagaagttcaatgaagctgctgttgacaatagggtgctaaaggcagacgtcgaaaccttaagagcaaaggtgaagatggcagaggactcggtgaagcgggtaacaggcatgaacgcattgtaccctgccgtgtcggatatgtcttccctcagcatgccattcaatggctccccttctgactccgcctctgatagcaccgtcccggtacaagatgacctgaacagttacttcgccaacccaagcgaaatcggatgcaacaacggctacatgccagatatagcctcctcggttcaacaggacgacaattttgtcaacgggtatcaggctgctggcaagatgggcagaacagactcgctgcagcgggtggcaagcctggagcacctccagaaaagaatgtgcggaggcccggcttcatccggctcgacctcctag

SEQ ID NO: 39 - DNA, 1017 bp, Zea mays
atggggctggacgtcggcggcatcgggatgggcctggatctgggtctggacctcgggctgttcgccgcgcggagcgccggagggatggcggccgcggccaagggtgcgccggcggagatcgagtcctgcatcaggagcctcgaggaggagcgccggaagatcgaggtgttcaggcgcgagctcccgctctgcgtgcgtctcctcgccgatgtgatcgacgaattgaaggatgaggccgccaagagaggcggagacgcggaggccaaggccgacgacggcgataagcggaaatggatgagcaccgctcagctgtggctcgacagcgacgccaaatccgacgagtctgacaaagagcaactgagtgaaatcacttcgccggagcccaagttgctcggtggcgcacccatgcccataagggccgttgcggcggtgccacccctgccgcctccattcttcaggagagaagacagctctgccggcagtggtctgtcgctggtaccacccgcagctaagccgccgattcctcccatgtctgccagcgacaacgcgagcggcagattctgtgccactatgccaccgtctggctctggggccaacttgcactctcaggctcagcagcaagccaggaaggcgaggcggtgctggtcgccggagcttcaccggctgtttgttgccgccttgcatcaactcggcggccctcaagttgctactccgaagcagatcagggaggtgatgaaggtggacgggcttacaaacgatgaagtgaaaagccatctccagaagtaccggctgcacaacagaagatcccccggcgtcgtggctccggtgagccagtcggtcatgctggcgggcggcctctgggctcctcctcatcaggagcaaagcagctcgcagtccgggtctccccagggcccgcttcagttctctggatccggtgtagcggccaccgtcggcggcgatagcagcagcagcgacgaggacgacaagtccgaaggctacagccggaaatacgtgtaa

SEQ ID NO: 40 - DNA, 1008 bp, Zea mays
atggacaccgcggcggagctggagctggggctggagttggagcagaagccggcggcggggtactggagcgtggtgggcgcgcgcccttgcgacgcgtgcgccgcggagccggcgcggctgcactgccgcgcggacggcgcgttcctgtgccccggctgcgacgcccgggcgcacggcgccgggtcgcgccacgcgcgcgtctggctgtgcgaggtctgcgagcatgcccccgccgccgtcacctgccgcgccgacgccgccgcgctgtgcgccgcctgcgacgccgacatccactcggccaacccgctcgcgcgccgccacgagcgcctccccgtcgcccctctcttcggcgcgctcgcggacgcgccgcagcccttcccgtccccggccttcgctgccgccgcgggggccgaggccccagctcagggggaagcggtggcggaagactacgggagcagcgaggccgaggcggcgtcgtggctgctccccgagcccgacaacagccacgaggacagcgccgccgacacgttcttcgcggagtcggacgcgtacctcggcgccgacctcgacttcgcccggtgcatggacggcgtcaaggccatcggcgtgccggtcgcgccgcccgagctggacatcggtgccggcagcttttgctaccccgaacactccatgaaccacattttgtcgtcatcctcggaggtggcggtggtaccggacgcgcaggcggccggcctgccggtggtggtggtggtgagcagaggggaggagcgggaggcgcggctgatgcggtaccgtgagaagcgcaagaaccgccggttcgacaagaccatccgctacgcgtcccgcaaggcgtacgccgagacgcggccgcgcatcaagggccgcttcgccaagcgccgctccgcggagggcgaggacgaggcgctggagcacgaggaaggggcgtgcttctcgcccacggggtcggcgcccgccgcgtcggacggcgtcgtcccgtccttctgttga

SEQ ID NO: 41 - DNA, 933 bp, Zea mays
atggcgggtggcggcgccggcgacgacgacgtggtggtggtgagctgcggcggcagaggcggcggcgaccccggcgcatacgccgcggtgctcaagaggaagctcgacctgtactgcgccgccgtcgccaaatccatggaagctaaatcacaagaacattcgttgggctaccccaactcacaagcttcagatgcttcgcaattgatttctcaagcttcctttgatggtgacatagatggggcaagcctagttacaaactctaatgtcatagaagatgatgattttcaaggcaagccaaccaacagtggcacatcaaaggaactgtcagacgatgatggtgaccttgaagagaatactgaccccgctaacgccaagaagatgaggagaatggtgtcaaaccgggaatcggctaggcgatcaagaaagaggaagcaagcacacttgaccgatcttgaatcacaggtttccaggttaacgtctgagaatgcatctttgctgaagcgactggctgatatgactcagaaatacaaggacgcttccgttgacaataaaaatctaacagttgatgttgagactatgaggagaaaggtgaacatagccgaggaagctgtcaggaggctaactgggatcaccctcatgctaccgaccgcttttgagaagcccacgagcagcgcgcccctgtcatcatgtccatctgatgcagcttctgcttctgcttctgccgccattgaagacagcgtgaagcatttcctccaggcgccacttgaaaacagtgggatcatcccaaacgcagcagtttttcagaccaagccagcttctctgcaccgtgttgctagcctggagaacctgcagaagaggatcgtcggggatgcaatgtattccgagaccgcgtcaacgacattctcagatcctgaagctcttgccgataggtaa

SEQ ID NO: 42 - DNA, 699 bp, Zea mays
atggagtacgccgccgtcggctacggctacgggtacgggtacgacgagcgccaggagccggcggagtccgcggacggcggcggcggcggcgacgacgagtacgcgacggtgctgtcggcgccacccaagcggccggcggggcggaccaagttccgggagacgcggcaccccgtgtaccgcggcgtgcggcggcgcgggcccgcggggcgctgggtgtgcgaggtccgcgagcccaacaagaagtcgcgcatctggctcggcaccttcgccacccccgaggccgccgcgcgcgcgcacgacgtggccgcgctggccctgcggggccgcgccgcgtgcctcaacttcgccgactcggcgcgcctgctccaggtcgaccccgccacgctcgccacccccgacgacatccgccgcgccgccatccagctcgccgacgccgcctcgcagcaggatgagactgccgccgttgccgctgacgtggtcgcgccctcgcaggcggacgacgtcgccgccgccgccgccgccgcggcggcgatgtacggcggcggcatggagttcgaccactcgtattgctacgacgacgggatggtgagcgggagcagcgactgctggcaaagcggcgccggcgccggcggatggcatagcatcgtggacggcgacgacgacgacggcgccagcgacatgacgctctggagctactga

SEQ ID NO: 43 - DNA, 786 bp, Zea mays
atggacaggccagatcaccagcagcagcagttcttcatgccgacgacggtgcaggtgccacagccacagcagcagcagcagcagctctgcgtcccgatgctcgacgagccgccgtcctcgtttttggcggggagaggcggaggcggggcgtcggggaggggggagaggaagcggcggttcacggaggagcagatacggtcgctggagtccatgttccacgcgcaccacgccaagctggagccccgggagaaggcggagctggcgcgggagctgggcctgcagccgcggcaggtggccatctggttccagaacaagcgcgcccggtggcgctccaagcagctcgagcacgactacgccctgctccgcgccaagttcgacgatctccacgcccacgtcgagtccctcaagcaggacaagctcgcactcaccactcagttgagcgagctaagcgagaggctgagggagcgggacgaccgggccgccgccgccggcggcggcggccgcgagacgatggctagcagcagcagctgcatcggcggtggtggtgaggaggaggcggaggacgacaagaggaacgtcctgctgttcggatgcgtcgacatggagccgcccgccgagagctgtgtgctcgtcgggtcgacgtgcgcggcgctggccgacgtctcggtggagtccgagtgcgacgaccagcaccttcactacgacgacgagttcccggagtcctactgcgccatgccggagctgtgggagccctggccgcttgttgagtggaatgcggtggcctga

SEQ ID NO: 44 - DNA, 774 bp, Zea mays
atggacagtaacagatccatggcgacgagcggcgtggctccgttcgtggccaagacgtaccgcatggtggatgacccggcgaccgacggcgtggtcgcgtggggcagggacaacaacagcttcgtcgtggccgaccccttcgccttctcgcagacgctcctgcccgcgcacttcaagcactccaacttctccagcttcgtgcgccagctcaacacctacggcttccggaaggtcgatccggaccggtgggagttcgcgcacgtgtcgttccttcgcggccagacgcatctcctgggccagatcgtccgccggagcaacggcggtaagcgcaaggacgacggcaacggtgccggctccggctccgccgacgacgaggacgcggtagccatggaggtggtccggctgaggcgggagcagcgggccatcgaggagcaggtggccgcgatgtggcgtcgcgtgcaggagacggagcgccggcccaagcagatgctcgcgttcctcgtcaaggtcgcgggcgacccgcaggtgctgcgccgcctcgtctccggcgccgggggcgacgccgtgttcgccgccgcggagccggaggacggcgcgagcatcaagagggcgcggctgcttctcgatgccggaagcggcggcgacggcgccgtcgacttcagcgggctctatagcacaaccgccggaagcgaagacgacggcgtcgggttcggcagcgattacctgcagccgccaccgccgtacgtgttccccgtcaacagcggcggctactga

SEQ ID NO: 45 - DNA, 513 bp, Zea mays
atgcaggagcaggcggcgagctcgcggccttccagcagcgagaggtcgtccagctccgggcaccacgtggacatggaggtcaaggaagggatggagagcgacgatgagataaggagagtgccggagctgggcctggagttgccgggagcctccacgtcgggcagggaggctggccctggcgctgcgggcgcagaccgcgcccttgcccagtcgtccacggcgcaggccagcgcgcgccgccgcgtccgcagccacgccgacaaggagcacaagcgcctcaaaaggttactgaggaacagggtgtcagctcaacaggctagagagaggaagaaggcttatttaactgatctggaggtgaaggtgagagatctggagaagaagaactcggagatggaagagaggctctccaccctccagaacgagaaccagatgctccgacagatactgaagaacaccgctgtaaacagaagaggttcaggaagcactgctagtggagagggccacggccaatag

SEQ ID NO: 46 - DNA, 918 bp, Zea mays
atggaccaaatcgctacccccgacgaaacagcacatgcctctgcaccttcagttcataagctgtttgatgctaaattaggccaccatagcgtgatggatggcaccttggcatccacgagtcagtcatcaaacatcaagacccagctgatccggtcatcaagcttgtcaaggagcatatcagttaaccttgagaagaggagccctgaatctgatcctgaaagcccacagtctcacgtctcgcatcctaaatttgcagaacccatgttctcgaattcttcgacgttctgcacaagcttgttttcgtcatcttcgacaacagagccatgccgtcaaatgggcactttacctttcctgcctcacccccctaagtgtgagcagcaggtttcagctggtcactcatcgagctcctctctgcttttaagtggtgataccggtttagatgtggctgaacagtcagatgatctgaacgacttgctcaatctttcgggagatgcttctgatggcagcttccatggagaaaacaatgccttagcttttgacgaacagatggaatttcagttcctgtctgagcagctagaaattgccatcactgacaatgagaagaatcctcatttagatgacatatacggcacaccaccacagctgtcatcacttccagtatcatcttgctccaatcagaatctagggtcaccagttaaagtccagcttagctcatctcagtcatcttctagctctgcaacagctaacaagtcaagattgaggtggacacttgagcttcatgagcgttttgtggaggccgtgaaaaagcttgaaggtcctgaaaaagcaactcccaaaggtgtgctgaaactaatgaaggtagaaggtctaacaatttatcatgtgaagagccatctgcagaagtatcggcttgcaaaa

SEQ ID NO: 47 - DNA, 1023 bp, Zea mays
atgtgcggaggcgccatcctcgcggagctgatcccgccgacgcggcgcgtggcgtcgaagccggtgacagaaggccacctctggtcggcgagctccaagaaagccggcagcggcagggacaagaggcaccagcacgaatacgccgacgatgacttcgaggccgccttcgaggacttcgacgacgactttgacgtgcatgaagacgacgaggacggccacttcgtattctcgtccaaatccgccttgtccccagccctgcacgacgggcgcgcggcgagccagaagaagcagcgcgggcgccagttccgcggcatccggcagcggccctggggcaagtgggcggcggagatccgcgacccgcacaagggcacccgcgtctggctcggcaccttcagcaccgccgaggacgccgcccgggcctacgacgtggaggcgcgccgcctccgcggcagcaaggccaaggtcaacttccccgcagccagcggtcgcgctcgcggtcgcgcgcgcccacgccgcggcgacgacggcaacccacgaaccgcgccggaaacgcagcacccagcacagcccgctctgctgcctcgaggagagagagagacgcagaggaaggaagggatcgccgccgtgaagccagaagctacggagtcgttcgacgtgggcggcggtctcttcttcgacatggccttccccaccttcccagcctcgccgccgccgcaggccgtggatacgtccttcgccggcagcaccgccacgtcggagaccgggagccccgcgaagaggccgagatgcgacgaagactcgtccgagggcggcagcggctccgcgctggagctcgctgacgagctggcgttcgacccgtttgtgctgctgcagatgccctactcgggtgggtacgacgacgactcactggacggccttttcgccgcagatgaggccgtgcagcaggacgtgggcaacggcatggacggcgtccgcctgtggagcttcgacgagttccccgccgtcgacggttctgttttctga

SEQ ID NO: 48 - DNA, 282 bp, Zea mays
atggcgtctatgtcgctgagctcgtcgagggcgcagtggacggcgaagcagaacaagctgttcgagcaggcgttggcggtgtacgacagggacacgccggaccgctggcacaacatcgcgcgcgccgtgggtggcaagtcggcggacgaggtcaggcgctactacgagctgctggtgaaggacttggagcacatcgaggccggcaaggtggccttccccgcgtacaggtgccccggcggctacgacgacgccgacagcgacaggctgaagcacctgacctga

SEQ ID NO: 49 - DNA, 1146 bp, Zea mays
atggaggtttgcagccctagcgatgacgtcatggaggctcagcggcggcagcgcgagccgacccaagccgggggctgctccgacgaccccagggcggtgctgacgtgcctcaccttcctggagcagaagatcgcccacctccgcggcatcatcagcgcagcgccgcggccgccgcggcagatggtgtcggccgagctcagctgcatcgccgtccagctcgtctccctctccaagagcctcgccgctgccggcggcgccgcggatctggacgacggcgccgcccggtcgccggctccgaacgacggcggcgacagcgactcgtccgaccacgaccccttccacgccgacgccgacgccgacgacgacggccgcctcccgccggccggctcctacgaggtgatcgagctcggcgaggaggagatcctggcgccgcacgtgcactcgtgcaaggtctgcggcaagggcttcaagcgcgacgccaacctgcgcatgcacatgcgcggccacggcgaggagtacaagacggcggccgcgctcgccaagcccgccgccgcggccgcggccacggcgcagtcgtcctcctcctcctccgcccggtgcttctactcctgccccttcgtggggtgcaagcgcaaccgggaggcgggagcaccgcagcttccagccgctcaagacggccgtagctacacctgccgccgctgcaacgtcaagcgcttctccgtgctcgccgacctgcgcacgcacgagaagcactgcggacgcgaccgctgggtctgctcctgcggcacctccttctcgcggaaggacaagctcttcgcccacgtcgccgccttcgacggccacgcgcccgcgctgccgcccgaggacgacgcggctgcccacaatgttgccaatggcggactcggcaccgactcttatcgccgcctgacgacgatggacaccgaggcagcgagcttggagttcttctcggacaccatgctcgatgctctcagctgttctgacatcgagggcttcgcgctcatggatggacaaggacagtgtctggacgacgacggacgagggtcgctctcaccctggccagtggggctcgattcctgtgactttgatggatttgatctcttcggggcaccaccaatcgatttctga

SEQ ID NO: 50 - DNA, 2619 bp, Zea mays
atgcagtgcgttcgcgatgaactgtgtagagcaggttctgaagagagtgttacctgcatctgcatggaagagggaggagacccgcagcttccgagcatctccgtggcacgcaccacgtccgaaggcgcgggggccgtcgacttggatctccttgagcagctactgtccggcgacaacggttggctcgaggtggtctcgcgctcgcccaactcggtagcgtttcctccaccctcggccttcttctcggctgacgcgacggccaccacagtgacgacgacggcggcgccggccgcgaacgccagctggttgattcagacgggcggcgcgagcaccccctccgtgcgggagcggttcagccaggccctgtcctacatccgtgatacgcagagcgacggcgacgtcctcgtgcagctctgggtgccggtcaaccgcgatgacgggaagctggtgctgaccaccagcggtcagccgttcacgctcgaccaccgctccgacagcctcatccggttcagggaggtgtccaccaagtaccagttcccagccgacgttaggtcaggggagtcaccagggttgccagggagggtcttcatcggcaggctccctgagtggtcgccggacatcaggtgcttcaccagctacgagtacgccagggtgacagatgcaaagtacctcgatgtccacggcaccatggggctgccagtgttcgagaaaagaagttacagttgcctgggcgttatcgagctgatcatgacaaagcagaagctcaacttcacctctgagctcaacaccatctgcagtgctctacaggcagttaatctcagaagtacagaagtttcgagcattccacgcaaaaagtttagcactgcttcctacaaagatgctttaccagagatactggaggtcctgagggcagcctgcttgacccacaagctgccattagctcagacatgggtcacatgtactcaacaagggaaacgaggcagccgacattctgacgagaactacaggtactgcatttccaccatcgacgaagcatgctttgtgaatgaagccgagatgcggggcttccatgaggcctgctccgaacaccatctgctgcgtggcgagggggtggcagggaaggccctcacgacaaaccagccatgcttcctgccggacattggatcctcaactaaattggaataccccttgtctcaccatgctaagatcttcaggttaaaaggtgcagtggcgatccgactgcggtgcacacgcactgggatagcagacttcgtgctggaattctttcttccaacagattgtgaagcactggaggagcagaagacagtgctggactccttgtcaggcaccatgcgaagtgtttgccagaccctacgtgtggtcacagatagagagatggaaggcgaagcggcgctggaaatgaacgagctgaactcttttactcctcctgagaaggacaaagatgagttgtcctttggaggcaattcagcagatcgtagaggggcctcttggacaagtctggcaggaacttcacagcaagaacccgagttagctgcattgcggatgcatggaacgttctcacctgtggggcagggtccatctctatctggtgttcaggcaactgctgaaggcagtaagacaaaaaggcgcacaaaggccgagaagaccgttagtttgcaggttcttcggcagtacttcgctggtagcctcaaagatgcagcgagaagccttggagtgtgtcccacgaccctcaaaagaatatgcaggcaacatggtataacccgctggccatcacgaaagatcaagaaggtagaccactctctaagaaagctccaacagatcattgattcggttcatggtgcagagacagctttccagctaaacaccctgtacaaggatctcacagacacctcaatatcatctgacaacaatttgtcaggaagtgtcacggttcctccaactaaccagagcaatctcaccgacttcaacaagcaccaaccccacaagtcaagtagcaatatgccatcaacttcacactcacactcctcatgcagccacggttctcagtcaagcccctcgtgtagcgttggtgcaacagaacatgcacaacagggtataattgatctgatgaagtcagaaaatcctgtgaaagacagctctattcagactatgcaaacagaaaacacttcattatatgagcatttctcagttcatgaggctccaattgatcttctacaggatgttactgaaaaggctaatggtgcacatcattcttctcgaagcctgtcatcccccaaccccaagcagaacacagatgcaaatatgagagtaaaggcaacatttggctcagaaaaggtgagattccgactaaacccagagtgcaattttcaaggactgaagcatgagctagcgaaacgtttgagtatagtagacacaaaccccttggttttaaagtacttggatgatgattcagaatgggtcttgatgacatgtgatgcagatctgcaggagtgccttcatgtatacaaactagcagatatccaaacaatcaaaatttcagttcatttagctgttagtccagctacaagggtcacagctggtcacactggtttgtcatga

SEQ ID NO: 51 - DNA, 1074 bp, Zea mays
atggacaagccggtggcgccgggcattatcaaggaggagctcctggagcagcagccgccgacgcaggacggtgtgggtggcggcggggatgcgccgcgcccgatggaggggctgcacgaggtgggtcccccgcctttcctcaccaagacgttcgaccttgtggaggacccggccaccgacgccgtcctctcctggagccgcgccggcaacagcttcatcgtctgggacccgcacgtcttcgccgacgggctgctcccgcgcctcttcaagcacagtaacttctccagcttcgtgcgccagctcaacacctatggcttcagaaaggttgatcctgacaggtgggagtttgcaaatgaaggtttcctcagaggtcaaaggcacctgctgaagatgataaagagaaggaagccaccatcagctgtggcaccattgcgacagcaacgtgcccctgcttcttgcctggaggttggtgagtttggatttgaggaggagattgataggctgaagcgtgacaagaacattttaatcacagaagtagtaaaactaaggcaggagcagcaaagtactaaagatcatgtgagagccatggaggaaaggctacgagtggctgaacagaagcaggtacagatgatggggttcttggcaagagcaatgcggaacccagagttcttccagcagttggcccagcagcaagacaagaggaaggagctcgaggataccatctcaaagaaaagaaggcggcccattgacaacacaccattctacagtgatggggaaagcgaacagcttgattcacagttgaaaatgttcgagtcaggtgttctcaatgggctcaatgaacctgagctggagaatttagcagtgaacattcaggagcttgggaagggaagcatagatgatgggaacttgactcaagttagtgaccagtcagagctgaacgacgacttctgggcagagcttttggtcgaagattttggagacaaggcaggacagccagagttggagggaagaactgaagacgtgaatgaccttgctcaacaactggggtatctgagttcttctagcccaaaatag

SEQ ID NO: 52 - DNA, 1287 bp, Zea mays
atgacgccaagtgtcacgccctggattcctctggcacccaccctcctattagtactctgcactggacttgcagcgctgtggatccatcactgcaacttcatggattataattttgacaccagcgtcctcgacgaggacgtcgccgggagaggaggcagggaagggagctgcccgccagcatgggccagggcgtgcgacgggtgccgcgcagcccccagcgtggtgtactgccatgcggacaccgcgtacctgtgcgcgtcatgcaactcgcgggtgcatgccgccaatcgcgtggcctcgcgccatgagcgcgtgcgcgtctgcgaggcctgcgagtgcgcccccgcggtgctcgcgtgccgcgccgacgcggcggcgctctgcgctgcctgcgacgcgcaggtccactccgccaacccgcttgcggggaggcaccagcgcgtgcccgtcctgccgctcccggccgccgccgtcccggctgcctctgtgctcgccgaggcagctgccaccgccgcggccgttgctggtgacaaggacgaggaggtcgactcctggctgctgctcaccaaggacccagacgacgacgacaagaaccacaactgcagtagcaacaacaacaacatcagcagcaacaccagcacgttctacgcagacgttgacgagtacttcgatctggtcgggtacagttcctactgtgacaaccacatcaatagcaacacgaaacagtacgggatgcaagagcagcagctcctgctgcacaaggagtttggagacaaggagggaagcgagtacgtggtgccttcacaggtcgggcagcagcagagtggctatcacagagttattgggacggagcaggctgcctccatgactcccggggtcagtgcttacacagattccatcagcaacagcatctctttctcatcgtcaatggaggtgggtatagtaccagacaacatggcaacgacagacatgccaagctccggcatcctgctgacgcctgctggggccatcagcctgttctcgtcgggtcctccgctccagatgccgcttcacttggcctccatggacagggaggccagggtgctgaggtacagggagaagaagaagagcaggaagtttgagaagaccatacggtatgcaacgaggaagacgtacgcagaagcacggccgaggatcaagggacgcttcgcgaaaagatcgtctgatatggatgtcgaagtggatcagatgttctcagctgcggctctgtcgtctgatggtagctatggtaccgttccatggttctga

SEQ ID NO: 53 - DNA, 675 bp, Zea mays
atggtgcgggggaagacggagctgaagcggatagagaacgcgacgagccggcaggtgaccttctcgaagcgccgcaacgggctgctcaagaaggccttcgagctctccgtgctctgcgatgctgaggtcgggctcgtcgtcttctccccgcgcggcaagctctacgagttcgccagcgccgccagcctccagaaaacaattgaccgctacaggacatacacaagggaaaatgtcaataacaagactgttcaacaagatatacagcaagtcaaagcagatgccgtaagcttggcaagtagactcgaagccctagaaaagaccaaacgaatgtttctgggtgaaaatttagaagaatgctccattgaagaactgcataatctggaggttaaactggcgaagagccttcacgtcatcagagggaagaagacacaactgctggagcagcagatatccaagctgaaggagaaggagaggaccctgctccaagacaacaaagagttgcgggataagcagcgcaacctccagtctccaccggaggcgccaccggacctgaaccgctgtgtccctccttggccgcgtagcctgccggcaccgagcaatgacatggacgtggagacggagctgtacataggattacccggcagggagcgctcctccaaccgggactctgattga

SEQ ID NO: 54 - DNA, 2043 bp, Zea mays
atggggattgatctcaacgccgtgggggaggacgacccggcgggcgcggtgtgcgcggagctgtggcacgcgtgcgcgggggctggagtggcgctgccgcggcggggcagcgccgtggtgtacctgcctcaggcgcacctcgcggcgggcggctgcgacggtggtggggtgtcggcgccggccccgccgcgcgtgccgccgcacgtggtgtgtcgcgtcgtcgacgtcgagctacgcgcggatgcggccacggacgaggtgtacgcgcggcttgcgctggtggcgatggatacgatgtttggccgaaacatcaatgatggtgaaactgaagagaagaatggcgaggaagaggatggcgacggagaaaagaagcacgcatcacacatgttctgcaagacactcacagcttctgataccagcacacatgggggattctctgttccacggcgagctgcagaggactgctttccaccattggactatgagcagcttaggccttcccaagagcttattgccaaggatttgcatggcatgaaatggaggttccgtcatatctatagaggtcaacctcgaaggcatcttctgacaactggatggagttcatttatcaataagaagaaactagtctcaggggatgcagtcttgtttcttagaggtaatgatggtgagctaagattgggtgtgaggagagcagttcaactgaaaaatgaagctctacttgaagctgtcaactgtactgattcgaagctacttatgctgtctgctgtggccaattctttggacaacagaagtatatttcacatctgtttcaacccaagggttggtgcatcagaatttattgtgccgtattgcaagttcttgaagagcttgaactatcacttttcagttggaaccagatttaaagttggctgcgagaatgaagatgctaacgagaggtcctttggattgatcataggtattagtgaagttgatcccatacactggcctggatcaaaatggaaatctctcctgataaagtgggatggtgctactaagtacagccaccagaatagagtatctccatgggacatcgagggagttggcagctcagtttcagttactcaccgactttcctcttctgtttcgaagcgaacaaaactgtgcttccctccaagcgatttggacacgccaattctagatggaaacggtcgtccagactcagtggaaactgaacgtttccacagggtcttgcaaggtcaagaattggtgcactctagtattcatggtactgcatgctctcattcatcagatagccccagatgtcaaggctcttatggcaggagattctctgctgatgcgtggaactgcaagatgaatgatgtaatgagtgggcctcgacacctaaatgccactgggtttgcttaccagcccctaggcttcagtgaatctgtcaaattctcagaggtcttgcaaggtcaagaaatgtctcaggcggttccttccttcatgagatctgctttcaactctggcacgcagaatggcagggttcgaccatttgattatgtgcagagatcagatgcaactcaaggatacgctctccagcagtttaatctgccagcaacagaagtgcattcgccctcttctgttcttatgtttaaccaaaccatggtaccacatgctgagctagatggtgcgaccaaccgtgaagaagtacatggcagcaggtacttgtcatccaatgcaatagggagagaagctgaaccatggccatccatgcagcagcaaagagcgagtgtaaatggaagcgagcctctcgacacaactgaagcctcagctcctgcaaggaacgctgaatctggatcggtcggcaggggcgcggggcgaagcaactgtaagctttttggtttctccctgactgagaagatccttggaacggatggtggtggtgtgaaagaagggaactacgaagtggaccgtcaaactccccgggtgctagacttgtttgggcacggttctacgcctggagctctgcatgctctctgtgctgctcccttgggaatatga

SEQ ID NO: 55 - DNA, 777 bp, Zea mays
atggaaatgggcgacagcttcgagtactactgggagatgcagcagtacctggagtcagaggagctcagcctctacatgggcacccaggacgatgccctgtcctgctacgactccagctcgccggatggctccatctccaactcgtcctgggcgccggcgggcgtggcggccacggcgtccgagaagcgggagggccccggcggcgcggcggccgcgaacaagaacatcctcatggagcgcgaccgccggcgcaagctcaacgagaagctctacgcgctgcgcagcgtcgtgcccaacatcacaaagatggacaaggcgtcgatcatcaaggacgcgatcgagtacatcgagcagctacaggcggaggagcggcgggcgctgcaggcgctcgaggccggcgagggggcgcgctgcggcggccacgggcacggcgaggaggcgcgcgtggtcctgcagcagcccgccgccgccccggcgcccgtggaggtcctggagctgcgcgtgtcggaggtgggcgaccgcgtgctggtggtgaacgtgacgtgcagcaagggccgcgacgccatggcccgcgtgtgccgcgccgtcgaggagctccggctccgcgtcatcaccgccagcgtcacctccgtcgccggctgcctcatgcacaccatcttcgtcgaggtggattcggaccagacgaatcgtatccagatcaagcacatgatcgaggccgctctcgcccagctagatgatgcctccgcgagcccgccgagcgtgatgagctactattag

SEQ ID NO: 56 - DNA, 756 bp, Zea mays
atgagctgcaacggctgccgcgtcctgcgcaagggctgcagcgacgcctgcgtgctccgccccagcatcgactggatccacggcgcgcagccgcaggccaacgccaccgtcttcgtcgccaagttcttcggccgcgccggcctcgtcgcctccctcgccgcagtcccgctgcaccaccgcccagccctcttccggtccctgctgtacgaggcctgcgggcggaccatcaacccggtgagcggcgccatcgggctcatgtggacgggcaactgggacctgtgccaggccgccgcggacgccgtgctccgcggcgagtcgctgcgcgcgctctccgccgtccccgccgcgttcacggaccgcgacatggacgggctctacggcagcgtcggcggcctggtcgccgccgccgccgccgccgcgtcgcccgagaactcctcctcctccgcgccgtccacaacgaagcgcaggaacgcgaacggcggctccagcaacaacgccgtccctgcggccgcggcctctcaccaccgcccgccgccgccggctgctgccgctgctgggctgctgctgcagtcgtcgtgccaccagctcgacctctgcctgacgccagcgctgtcgccgccgggcgccgggccgcggggctgcgccgccggcgcgtccgacgagtactcggccacgaccacgtgcgaggaccagaccggtgatcacggacacggagagcccaggcctcccccgccgctgctaaacctcttcaactga

SEQ ID NO: 57 - DNA, 264 bp, Zea mays
atgtctgagtccaggagctctttccgcaacgttaacactgattgcaactggagcaaaaaggagaacaagctgttcgaggaggccctagcccgctatcgcgagggcacacctgaccgctggctcaaggtgtcccgtgccatgggtggcatcaagacagccgatgaagtccgccgtcattatgagatccttaatgaggatgtcacactcattgtatctggcggaattccattccccaactacaacacacagggagcttggaactga

SEQ ID NO: 58 - DNA, 258 bp, Zea mays
atgtccgcctcacgcagctcctctcccaactccatctcacagtggagccagaaagagaacaagatgtttgaagaggcactcgcatactacggcgagggcacatccaaccggtgggacaaggtgtccagagccatgggaggcatcaagtctgctgaggaggtgcgctgccactatgaagatcttgactatgacgtcaagatgattgaatcaggccacgtgccgtaccccaagtacaagacacatggattctggacctga

SEQ ID NO: 59 - DNA, 291 bp, Zea mays
atggcgtcgctctcgatgacgacgagcgcagcggcccgcgcgcagtggacgcctaggcagaacaagctgttcgagcaggcgctggcggtgtacgacaaggacacgcccgaccgctggcacaacatcgcctgcgccgtcggcggcgggaagtccgcggacgacgtcaggcgctactacgagctgctggaggaggacgtcggccacatcgagtccggcaaggtgcccttccccgcctaccgctaccccgccggctacggggccgccgacaggctgaaacagctgaagatctag

SEQ ID NO: 60 - DNA, 1371 bp, Zea mays
atgccgccgacgacccatcatatctatggttacttattattgggcatggagcacgtcatctcaatggaggagatcctcgggcccttctgggagctgctaccaccgccagcgccagagccagagccagagcgagagcagcctccggtaaccggcatcgtcgtcggcagtgtcatagacgttgctgctgctggtcacggtcatggtggcggcgacatgatggatcagcagcacgccacagagtggacctttgagaggttactggaagaggaggctctgacgacaagcacaccgccgccggtggtggtggtgccgaactcttgttgctcaggcgccctaaatgttgaccggccgccggtgatggaagaggcggtaatgatggcgcctgcggcggtgagtagtgccgtagtaggggaccccatggagtacaatgccatactgaggaggaagctggaggaggacctcgaggccttcaaaatgtggagggcggcctccagtgttgtgacctcagatcaacgttctcaaggctcaaacaatcacactggaggtagcagcatcaggaataatccagtgcagaacaagctgatgaacggcgaagatccaatcaacaataaccacgctcaaaccgcaggccttggcgtgaggcttgctactagctcttcctcgagagatccttcaccatcagacgaagacatggacggagaagtagagattctggggttcaagatgcctaccgaggaaagagtgaggaaaagaaaggaatccaatagagaatcagccagacgctcgagatacaggaaagccgctcacctgaaagaactggaggaccaggtagcacagctaaaagccgagaattcttgcctgctgaggcgcattgccgctctgaaccagaagtacaacgacgctaacgtcgacaacagggtgctgagagcggacatggagaccctaagagctaaggtgaagatgggagaggactccctgaagcgggtgatagagatgagctcatcagtgccgtcgtccatgcccatctcggcgccgacccccagctccgacgctccagtgccgccgccgcctatccgagacagcatcgtcggctacttctccgccacagccgcagacgacgatgcttcggtcggcaacggtttcttgcgactgcaagctcatcaagagcctgcatccatggtcgtcggtggaactctgagcgccacagagatgaaccgagtagcagcagccacgcattgcgcgggggccatggagctcatccagacggcgatgggatccatgccgccgacctccgcctccggatctacaccgccgccgcaggattatgagctgctgggtccaaatggggccatacacatggacatgtattag

SEQ ID NO: 61 - DNA, 1089 bp, Zea mays
atggggctggacgtcggggagatcgggatgggcctggatctggggctggacctcaggctgttcgccgcgcggagcgccggagggatggccaagggcgctgcgccggcggggatccagtcctgcatcaggagcctcgaggtggagcgcaggaagatcgaggtgttcaggcgcgagctcccgctctgccttcgcctcctcgccgacgtgatcgacgagttgaaggaggaggctgccaagagaggagagtacgacgacggggcggcgacggtggacgacggcgacaaacggaaatggatgagcacagctcagttgtgggtggacagcgacgccaaatcggacgagtctgacaaagagcaacagagtgaaatcacgtcgccgccggagcccaagttgttgggtggtggcgcacccacgccgataagggcggccgtttcggcggtggcggtgccacaacccctaccgccgccgttgttcagaagagaagacagctccgccagctctggcctgtcgttggtatcgttgtcgccggcaaccaaggcggcggtgccgatttctcctccggtggtggctgccagcggtaccggtaccgccagcgccagattttgtggcaccaccatgccaccatgtggctccgaggtcaacaacatgcactcgcaggctcagcagcaacagcaagcaagcaggaaggcaaggcggtgctggtcaccggagcttcaccggcggttcgttgccgctttgcacgaactgggtggccctcaagtggctactccgaaacagatcagggaggtgatgcaagtggacgggcttacaaacgatgaagtgaaaagccatctccagaagtaccggttgcacaacagaagatcctcccccggcgcggcggcggctccggtgagccagtcgatcatgctggtggatggcgtctgggctgctcaggagcaaagcagcggctcgcagtccgggtctcggcagggcccgctccagttctccagggcaggtatggccgtcggtggcggcgacgacagcagcagcagcgacgacgacgaagacgacgacaagtcggaggatggctacagcctgaaatgcgtgtga

SEQ ID NO: 62 - DNA, 972 bp, Zea mays
atgaagggtgacgagaagtcggcgggcggggcccctgcgtactggggcctcggcgcgcggccctgcgacgcatgcggcgccgaggcggcgcgcctctactgccgcgcggacgcggcgttcctgtgcgccgggtgcgacgcgcgggcgcacggcgccgggtcgcgccacgcgcgagtgtggctctgcgaggtctgcgagcacgcgccggcggcggtcacgtgccgcgccgacgcggccgcgctctgcgcctcctgcgatgccgacatccactcggcgaacccgctcgcgagccgccacgagcgccttcccgtggcacccttcttcggcgagctggccgacgcgcccaagcccttcgcctcgtcggcggccgtgcccaaagcggccgacgacgacgggagcaacgaggccgaggctgcgtcgtggctccttcccgagcccgaccacgggcagaaagaaggcgccacgacggaggtgttcttcgcggactccgacccatacctcgacctcgacttcgcgcgttccatggacgacatcaagaccatcggcgtccagggcgggccaccagagctcgacctcgccggcgccaagctcttctactccgatgactccatgaaccacagtgtatcatcgtcggaggcggcggtggtgcccgacgcggtggctggcgcggcgcccgaggtggcagtggtctgcaggggcctggagcgggaggcgcggctgatgcggtaccgggagaagcgcaagagcaggcggttcgacaagacgattcggtacgcgtcccgcaaggcctacgctgagacgcggccgcgcatcaagggccggttcgccaagcgcacgcccggggctggggcggacggcgaggagccgctggaggagcacgaggagatctactcctcggccgcggccgccgtggctgcgctcatggcccccgggggagccgacgcggactacggtgtcgtgcccactcattga

SEQ ID NO: 63 - DNA, 1218 bp, Zea mays
atggagcgcgtcttctccgtggaggagatccccaacccctactgggttccgccgcaccctcaatcggcggccgccggcgctgttgctgcaccagcgggggaggcggcggggctgatgaaccggtgcccgtcggaatggtacttccagaagttcctggaggaggccgtgctcgacagcccggttcccgtagccggcgccagtaggggcagcgttggagctggagttgaggctgcggagagcaagacaccgggggccgcggcgccggcggctgcctcgagctcggttgttgaccccgtggagtacaacgcgatgctcaagcagaagctggagaaggacctcgctgccgttgccttgtggagggcttctggtgcagcacctccagatcattctccagctggttcttccttgccaagtgtggatgttccacacgcaggccctcttaaacccatcggaggtactggaagtctagttcaaaacaagctagttggtgctccaggcgggggatcaagtccacatgtagtacaaaatgccgatatccctgttaagcaaaccactagctcttcctcacgtgagcagtcagacgatgatgacatggaaggagatgctgagactactggaaatggaaaccctgttcaacacagattacagagaaggaagcaatccaaccgagaatcagccaggcgttcgagaagcagaaaggcagctcacttgaatgaactggaggcacaggtatcacagttaagagttgagaactcttcgctcctaaggcgacttgctgacgttaatcagaagttcaatgaggctgctgttgacaatagggtgcttaaggcagatgttgaaaccttaagagcaaaggtgaagatggcagaggactcagtgaagcgggtaactggcatgaacacattgttccctgccgtgtctgatatgtcgtccctcagcatgccattcaatggctccccatctgactccgcctctgatgccgccgtacccatccaagatgacctgaacagttacttcgccaatccaagcgagatcggaggcagcaacggttacatgccagatatagcttcctcggttcaagaggacgacgatttcgtcaacggggctcaggtcgccggcaagatgggcagcactgactcgctgcagcgggtggcgagcctggagcacctccagaagaggatgtgcggaggcccggcttcatcggggtcgacctcctag

SEQ ID NO: 64 - DNA, 669 bp, Zea mays
atggactgggcgtactacggcagtggctactcgacgccggcgagcggcggcggcggcggggacgaggacgcctacatgacggtgtcgtcggcgccgccgaagcggcgcgcggggcggaccaagttcaaggagacgaggcacccggtgtacaagggcgtgcgcagcaggaaccccgggcggtgggtctgcgaggtgcgggagccgcacggccggcagcggatctggctcggcaccttcgagaccgccgagatggcggcgcgcgcgcacgacgtggccgcgctggcgctgcgcggccgcgccgcctgcctcaacttcgccgactcgccgcgcaggctgcgcgtgcccgcgcagggcgccggccacgacgagatacgccgcgccgcggtggaggcggccgagctgttccgcccgcagcccggggagcgcaatgtgggaggttccgaggcggcggccgaggcggcggcggcggcgccctgcgcgatggggagcggcgacctcggcggcggcgaattcccttactacccggtggacgacgggctggagttcgagatgcgtgggtaccttgacatggcgcaggggatgctcatcgacccgccgcagccggccgctgggcagtcggcgtggatcgaggacgagtacgaatgcgaggtcagtctttggagctactga

SEQ ID NO: 65 - DNA, 708 bp, Zea mays
atggagcgcggcgactgccagttcacggtggtgccgccgcggcagtacgacgaggcccagttcatgcaccagctgatggtggccggcgaccagcaggaccccgcgggcgcggggcggggagctgccgccgccggcggggagaggaagcggcggttcacggaggagcaggtgcggtcgctggagacgacgttccacgcgcggcgcgccaagctggagccccgggagaaggcggagctggcgcgggagcttggcctgcagccgcgccaggtggccatctggttccagaataagcgtgcgcggtggcgctccaagcagctggagcatgactacgccgcgctcagggctcagttcgacgcgatgcacgcccgcgtcgagtcgctcaggcaggagaagatcgcgctcgccgcgcaggtagacgagctgcgggggaggctgaacgagcggcaagaccagagcggcagctgcgaggtcaacgacgcggaggcggcggcggacgacaagaggaacaatagcaccagctccctcgtgcaggacgacggcgccacgccgccgccggctgcagtagacgcctccgaggactcggcggcgaccggcgagtactacgaccacgtcgcgtacgagtacgatggcctgcacgaccccttcgtctgcgccactccggacctgtgggatacgtggccgctgctggagtggaacgcggtggcctga

SEQ ID NO: 66 - DNA, 804 bp, Zea mays
atggcggcgggcggcggaggcggctcgccggcgccgttcgtgtggaagacgtacacgatggtggaggaccccgggacggcaggggtgatcggctggggcagcggcaacaacagcttcgtcgtcgccgaccccttcgtcttctcgcagacgctgctccccgcgcacttcaagcacaacaacttctccagcttcgtccgccagctcaacacctatggcttccgcaaggttgatccggaccggtgggagttcgcccacgcgtcgttcctgcgcggccagacgcacctcctgcgcaacatcgtccgccgcggcagcagcgccgccggtgccggaggcggaaagaggaaggacgccagccccacggagctggcctccggggacgacatgaccatggtggccacggaggtggtgcgcctcaagcaagagcagcgcgccatcgacgaccgcgtcgcctccatgtggcgccgcgtgcaggagacggagcgcaggcccaagcagatgctcgcgttcctcctcaaggtcgtcggcgaccgcgacaggctgcaccgcctcgtcggcgacgcccccgtgccagataacgggttcgcctccggcggtgccgccgagccgcccgccgcggaggtcggcgagaagcgggccaggctgctgctcgacggtgacagcatggtggcgctcggtcccgaggccgtcgacttcgccgggttctacagcggcggcggtgcgttcggcgatgttgccgtggatgctgccgctgggtcccgcggaggcgggttctcgtttgcgttcggcgtggacgcggggtactga

SEQ ID NO: 67 - DNA, 417 bp, Zea mays
atggagagcgacgaggagatcaggagggtgccggaggttggcctggagctgctgaccagcccgtcgacgtccggcagggaggcgaccgctgccgcggccgctgccgggacgtcgtccgcgtcgcaggcggccagcgccagccgccgcggccgcagcccggccgacaaggagcaccgccgcctcaaaaggttgcttcggaaccgggtgtcggcgcagcaggcacgggaaaggaagaaggcgtacctgagcgagctggaggtgagggtgaaggagctggagaagaggaactcggagctggaggagaagctgtccacgctgcagaacgagaaccagatgcttagacagatactgaagaacaccactgtcaacaacagaagaggcccaggtagcagcagtgctggtggagacagccaatag

SEQ ID NO: 68 - DNA, 1317 bp, Zea mays
atgaactttttggaatctattgcggtgaatggacacagagaccgacagcatggaggcgtcatgagcagacagagcatggtcgccgtggagcagctcaccggccctgccagtgccagacccgctcacacgtgcgctgctcagcctcatgctcaccagctgctcagtgctcgatacgatcaccgtggcgcgtgcgcgtctcaagttgaattaccggaccggatctcgccatccaacgcttccacgttctgcacgagcatgtactcgtcgtcgtcgtcgtcgtcggcggcggcggattcctccaagtcgtgccggcgggcaggcgctctgccgttcctgccccatcctcctaaacgtgagcagcagcagcagcagcagtcatccagctctccatcactgctcgtctgtactgacctcggcaacggtggtcaagacgaggctgaagctgaacatccggctgagctcaaggacttcctgaacctctctggagaagcttcatggagaggcggtttccatggagagagcagcggcgtcgctttcagattcggagagcaggtggagtttcagttcttgtctgaacagctcgggatcgccatcaccgaccacgacgagagccctcgactagatgacatatacgacaggccgccgcaaacctcttcttgtccggtactgtcttgctccgaccaagaagaaggtctccagagggcagggtctcctgttaaagctcagccgagttcatctcgagctgcatcatgtaataacaagccaagactgaggtggactctggagctccatgagcttttcgtgaaggctgtcaacaagcttggagggccagaaaaggcaactcctaagggcgtgttgaggcttatgaaggtagaaggcttgaccatctatcatgtgaagagccatttgcagaagtatcgttttgccaagtatcttccggagacaaaagaagacatgaagtcctcttcagaagacaagatatccaaatcagagatgcctggaagcaacgctggcagaaagaagattctcagaagcttacaagtagcagaagctcttcggatgcaaatggaggttcagaaacaacttcatgaacaattagaggtgcaaaggcagctacaagtgcgcatagaagaacatgcaaagtatctgcacaagatattagaacagcagaaggcaaggaattccttatcagctacgacaagttcaatagaaacagagctttctgaatctacaaaggaagagaaacctgagacacaagcggatacttcttcagctcagttgccaaataaaaagaactcagatactgacatggaatga

SEQ ID NO: 69 - DNA, 1086 bp, Zea mays
atgtgcggcggcgcgatccttgccgagctccgcgagccggcgccgcgccggctcacggagcgggacatctggcagcagaagaagaagcccaagaggggcggcgccggcgggaggcgctcgttcgcggcggaagacgatgaggacttcgaggccgacttcgaggactttgaagccgactccggtgattcggatttggagctcggggaaggggctgacgacgacgtcatcgagatcaagcccttcgccgccaagagtactttctccagagatggcttaagcaccatgactactgctggttatgatgcccctgcagcaaggttggccaaaaggaagaggaagaatcaatacaggggtatccgccagcgcccttggggtaagtgggctgctgagatcagagatccccagaagggcgttcgtgtttggcttggtactttcaatagtccggaggaagctgcaagagcttatgatgctgaagcgcgcaggattcgtggcaagaaggccaaggttaactttcctgatgcaccagcagttggtcagaagtgccgttctagttcagcttctgctaaagcactcaagtcatgtgttgaacagaagccaattgtcaaaacagatatgaacatccttgccaacacaaatgcacccttctaccaatctgttaactacgcatccaacaatccatttgttccagcaatgaactctactgtttcttttgaggatcctatcatgaatctgcactctgaccagggaagtaactcccttggctgctcagacttgggctgggagaatgatactaagacaccagacatcacatccattgctcccattcccactattgctgaaggcgatgagtctgtatttgtcaactccaattcaaacagctcgatggtgcctcctgtcctggagaacaatgctgttgatctcactgatgggctgacagatttggaatcctatatgaggtttcttatggatggcggtgcaagtgattcaattgatagccttctgaaccttgatggatcacaggatcttggtagcaatatggacctctggaccttcgatgacatgcccatcgctggcgatttcttctga

SEQ ID NO: 70 - DNA, 1560 bp, Zea mays
atggaaggcaggatgacaagtttggaagccaccatgaaagtttcctcatcgatggcaagcagcatatcaaggaatgctgaccctgaccaacagactctacgccccaattcggtggagcagttttattttccaagacctggtcaatctttgccaggcattcctccattctttgggcctccctcctccagtttgtatcttcctaatgacaatgaagctaaatttggcaatcagtttgaatcaaatccttcacagaatacagattgggatccgcaggctatagtgagcaacctaaccttccttgagcagaagatcaagcaggtaaaagatattgtgcagtctatgagtaatcgagagaaccaattagctggcggttccagtgagctagccgcaaagcagcatcttgtaactgctgatctcactagcattataatccagctcatatctactgctggttccctgctcccttcaatgaagaatccacttcttagcagcaatccagcagttaggcagcttggcaacactcttggttctcctatgggccttggcatgaatgctaatcagagaccaagtgtagacagcaagactgatattcctgacacaggaaaaacttctgattatgatgaactgatgaatagccttaatcctgcccaagatgaaagagatgagatgatcaaatgtccaaatccctgtggtggggaagggtctgaaccgactcccatggaggaccatgatgtgaaggaaagtgatgatggtggtgagggagagaatctcccccctggttcatatgtagtcttgcaattggaaaaggaggagattttagcaccacatactcatttctgcttgatctgtggtaagggtttcaagagagatgctaaccttaggatgcacatgaggggccatggagatgagtacaaaactccagctgctcttgccaaacccacaaaggattcaggtgcagatcatgcacctgttacaaggtactcatgcccatttgtgggttgcaaacggaacaaagagcacaagaagttccaacctctcaaaacaatcttgtgcgtgaagaaccactacaagcgaagccactgtgacaagagttacacctgcagccgttgcaacaccaagaagttctctgtcatcgcggacttgaagactcatgagaagcactgtggtcgtgataaatggctctgttcttgtggaacaaccttctccaggaaggacaagctttttgggcacgttgcccttttccaaggccacacacctgcgcttcccatggaagatgtgaaggtatcagaagcatcagagcaacctcaggacagtgagccgatgaatgaaatggcgaggagtaatatgtatagcttcccctgtagttcgtctgatggtatatcgaacctcgacatgaaaatggctgatgatgtgcgtggttatttctcgccgctgaactttgatccttgctttggcgcgctcgacgatttcactcgccctgggtttgacatctctgagaaccccttctcattcctgccttcaggatcttgcagttatgggcagcagaacggagatagctga

SEQ ID NO: 71 - DNA, 2556 bp, Zea mays
atggaagagggaggagacccgcagcttccgagcatctccgcaccacgcaccacgtccgaaggcgcggggggcgtcgacttggatctccttgagcagctactgtccggcgacaacggctggctcgaggtggtctcacgctcgcccaactcggtagcgtttcctccactctcagccttcttctcggctgacgcgacagccaccacagtgacgacggcggcgccggccgcgaacgccagctggtggattcagacgggtggcgcgagcccctcctccgtggaggagcggttcagccaggccctgtcctacatccgggatacgcagagcgacggcgacgtcctcgtgcagctctgggtgccggtcaaccgcgatgacgggaaactggtgctgaccaccagcgagcaaccgttcacgctcgaccaccgctccgacagcctcctccggttcagggaggtgtccaccaagtaccagttctcggccgatgttaagtcgggggattcgccggggctgccagggagggtctttatcggcaggctccccgagtggtcgccggacatcaggtacttcaccagctacgagtatcccagggtaagggatgcacaatacctcgatgtccacggcaccatgggtctgccagtgttcgagaagggaagctacaactgcctgggcgtcatcgagctgatcatgacaaggcagaagataaacttcacctctgagctcaacaccatttgcagtgctctccaggcagttaatctcagaagtacagaagtttcaagcattccacgcataaagttcagcactgcttcctacaaagatgctttaccagagatactggaggtcctgagagcagcttgcttgacccacaagctgccattagctcagacatgggtcacatgtgctcaacaagggaaacgaggcagccgacattccgacgagaactaccggtactgcatctccaccattgatgaagcatgctttgtgaatgaagccgagatgcggggcttccatgaggcctgctccgagcaccaccttctgcgcggggagggggttgcagggaaggcctttacaacaaaccagccatgcttcttgccagacattggatcctcaactaaattggaatactccttgtctcaccatgctaagatcttcaagttaaaaggtgcagtggcgatccgcctgcggtgcacacgcactgggacagcagactttgtgctggaattctttctgccaacagattgcgaagcactggaggagcagaagtcagtgctggactccttgtcaggcaccatgcgaagtgtttgccagaccctacgtgtggtcacagatagagagatggaagacgaaacggtgctggaaatgaacgagctgaactcttttactcctcatgggaaggacaaagttgagttgtcctttggatgcaattcagcagatcgtagaggagaggcctcttggacaagtctggcaggaacatcacagcaagaatccgagttagctgcattgcggatgcatggaatgttctcacctggggggcagggtccatctctatctggtgttcaggcaactgctgaaggtagcaaggcaaaaaggcgtacaaaggccgagaagaccgttagtttgcagattcttcggcagtacttcgctggtagcctgaaagatgcagcaaggagccttggagtgtgccctacgaccctcaaaagaatttgcaggcagcatggtataacccgctggccatcgcgaaagatcaagaaggtagaccactctctaagaaagcttcaacagatcattgattcggttcatggagcagagacagctttccagctaaacaccctgtacaaggatatcacgaacacctcaatatcatctgacaacaatttgtcaggaagtgtcacggttcctccaaccaaccagagcaatctcaccgacgtcaacaagcaccaaccccacaagtcaagcagtaatgtgccatcaacttcacactcacactcttcgtgcagccacagttctgagtcaagtccctcatgtagcggtggtgcaacaaaacatgcacaacagggtataattgatcagatgaagtcagaaaatcctgtgaaagacagctctattcagactctgcaaacagaaaacacttcattatttgagcatttctcagttaatgagactccaattgatcttctacaggatgttactgaaaaggctaatggtggacatcattcttctcgaagcccgtcgtcccccaatcccaagcagaacacagatgcaaatatgagagtaaaggcaacatttggctcagaaaaagtgagattcagactgaacccagagtgcaattttcaagaactgaagcatgagatagcaaaacgtttgagtatagtagacacaaaccccttggttttgaagtacttggatgatgattcagaatgggtcttgatgacatgcgatgcagatctacaggagtgccttcatgtatacaaactagcaggaatccaaacaatcaaaatttcagttcatttagctgttagtccagctacaagggtgacaactggtcacactggtttgtcatga

SEQ ID NO: 72 - DNA, 1155 bp, Zea mays
atggacctgatgctgccggtgacggtgaaggaggagtggccgccggaagaggaggaggaggaggacgtggacgcggacgcggacgctccgcggccgatggaggggctgcacgaggtcgggccaccgccgttcctgaccaagacgttcgacctggtggccgacccggccaccgacgaggtcatctcctggggccgcgccggcaacagtttcgtggtctgggatccccacgtgttcgccgccgtgctgctccccaggttctttaagcacaacaacttctccagctttgtccgccagctgaacacctatggcttcagaaagatcgacccggacagctgggagttcgcgaacgaaggattcctgaggggccagaggcatcttctccggctgatcaagcgtcgaaggccggcgccaccgccgccgtacctccaggcgtcgcagtcgcaggggtcgtgcctggaggtgggccggttcggagggctggacggagagatggagcggctgaggcgtgacaagagcatcctgctggcggaggtggtgaagctgcggcaggagcagcagagcacgcgggcgggcatgcgggccatggaggagcggctgcggcacgcggagcacaagcaggtgcagatgatggggttcctggcgcgggcggtgcagagcccagacttgttccagctgctggcacagcagcaagcccggcggagggagctggagggcgcggcgctgctctccgccgcctcccggaagcggaggcggcccatcggcgccgcgccggccaacggcggcttgcagcagcaggaggaggagcagcagcagggcgacgacgacgaccccaccgccacgcgggcgctgttcgcggagctggacgagcgagggaccacgtcggagctggagaacctggcgctcaacatccaggggctcggcaagcgcaggcaggacgggagcgagaagcagggtggccgcgcgcggagccagcagcagggcgggttcgagacggcggagctcaccgacgacttttgggaggagctgctgaacgaagggatgaagggcggtgcggaggctgagacgctgccgccggagaggagacgaccggcttggtacgtcgacgcgctggcgcagaagttgagctccatgagcaataacaccacggcgaagtag

SEQ ID NO: 73 - DNA, 699 bp, Zea mays
atggtgcggggcaagacgcagatgaagcggatagagaacccgaccagccgccaggtcaccttctccaagcgccgcaacggcctgctcaagaaggcgttcgagctctccgtcctctgcgacgccgaggtcgccctcgtcgtcttctccccgcgcggcaagctctacgaattcgccagcggaagtgcgcagaaaacgattgaacgttatagaacatacacaaaggataatgtcagcaacaagacagtgcagcaggatattgagcgagtaaaagctgatgcggatggcctgtcaaagagactcgaagcacttgaagcttacaaaaggaaacttttgggtgagaggttggaagactgctccattgaagagctgcacagtttggaagtcaagcttgagaagagcctgcattgcatcaggggaagaaagactgagctgctggaggagcaagtccgtaagctgaagcagaaggagatgagtctgcgcaagagcaacgaagatttgcgtgaaaagtgcaagaagcagccgcctgtgccgatggcttcggcgccgcctcgtgcgccggcagtcgacaacgtggaggacggtcaccgggagccgaaggacgacgggatggacgtggagacggagctgtacataggattgcccggcagagactaccgctcaagcaaagacaaggctgcagtggcggtcaggtcaggctag

SEQ ID NO: 74 - DNA, 2067 bp, Zea mays
atgggcatcgacctcaacatggcggacggcgagagccaggagcgccgcccgccgccggcggtgtgccgggagctgtggcacgcgtgcgcggggcccgtggttgcgctaccgcggcggggcagcctggtcgtgtacctgccgcaaggccacctagccgcggccggcggcggcaacgtcgctgtggacctgccgccgcacgtggcgtgccgcgtcgcggatgtcgagttatgcgcggatgcggcgacggacgaggtgtacgcgcggctggcgctggtcgcggagggcgaggcatttgggagaaatctgcgtggtggtggagtcgatggggacgatgacatggaggattttgatgttgaaaggaagtcccggatgttgcacatgttctgcaaaacgcttacagcctctgacacaagcacacatggagggttctctgttcctcgtcgtgctgctgaggactgtttcccgcctctggattataatcagctcaggccttctcaagagctggttgccaaggatttgcatggagccaagtggaaatttcgtcatatatataggggtcagcctcgtaggcatctcttgactactggatggagttcatttgtcaataaaaagaaactggtttctggggatgcggtcttatttctccgaggtgatgatggtgaactaaggctgggcgtacggagggccattcagcttaaaaatgaggccctttttgacgatttcagttgcgacagtacaaaacggcatacattgttggctgtagctgattccttgaagcacaaaagtgtttttcacatttcttacaatccaagagctactgcttcagaatatattataccacaccataagttcctgaagagcctaaatcttccattctgtattggagcaaggatcaacttacagtgccataatgaagatgttagtgaaaggcgatctggaatggttgttcatgtcagtgaaatagatcccatgaaatggccaggctcgaagtggagaagcctgctggtaagatgggaggatggtgttgaatgtaacggccaagatagagtatctccatgggagattgagatagctggtggctctgtctctgttgctcattctgtgtccgcatctagctctaaaagaaccaagttgtgtcctcagggaaatttggacgttccaacaatgtatgttacagggaatgggaatggttgtactgactccgtggaaactggaaagtttcccagggtcttgcaaggtcaagatttgatgagttttaggactcgtcatgttccgtctgctcctcaaactgttgaggctgcaaaacttcaatcttctggtgctagtaggttcctcagtaatgcacgtggctgcgcattgggtggtccaacaagcagactcgcagtgcataactctgattttacctaccaatctgtaggcttcaatgaatctattggattctcagaggtcttgcaaggtcaagaaatttctcgggcagttcctatgttccaaggaatgatgtctgaggcttgttcactaaaaggaggatatgggctgcatagttatatgcgtaccccagttgctgttactggattgtcagccacaactcaagagtgttctctcacactatctactccgccaggagcacaagttccttctgtctaccctgataatatttttaaccgaactgtggttcgacagcttggactggcaagcaagtttgatggtggagctacaaatgcccagcagtctgtcccatttgataggccgagggaaatttggagcaagccacagcatgaaatatctgatcaaacgaaaatggatcactttgagactagaagagcttcagcacctggagatgatgctgctaagcatgggtctggtggagaggtggttcgcaaaactagctgcagactttttggtttctcgttgactgagaagatcttgccagcagatgatgatggcatcaaggaagtgacctatgagcctgagtgccagaatccacggatgctggacctgttcgggtacaactgctcagccccaagtgctgctcttccagctctgtgtgctgccccctttggaatgtga

SEQ ID NO: 75 - DNA, 990 bp, Zea mays
atggacaagtactgggaggagacgcagcgctacctggagtacgaggagctcaggtacgagtacgaactacgaacgaacgaaccaccaagtccgcgcgccgccgatacaatgcgcgcgccgaccgagcattcattcatctatccattcctccgtcggtggtggttgcagcatctacttggaggcgcaggaggacgccatgtcttgctacgactccagctcgccggacggctccatctcccactcgtcgtcgtcggcggcggcgtgcggcaacaagaacatcctgatggagcgcgaccgccgccgcaagctcaacgacaagctctacgcgctccgcagcgtcgtgccgaacatcaccaaggcaagcggcggtcacgcactcacgctgcgaccgaccgacggtcgtctgtcccgtcgtcgtccgtgctctcggcattatattatattgcatgcatgcagatggacaaggcgtcgatcatcaaggacgccatcgagtacatccagcagctgcaggtggaggagcggcgggtgctgcaggagctgcgcgtgctcgacgacgacaccgccgccgccgccaccgcgcaggtggagtgctgcgacgtcgacgggggcctgctgcgacgggaagccgagcgcgcgaagaagatgaagcgcgcgcagtccgtcgccagcggcgcgcagtctgctccgcctccgcccccgccgccgcacgtcgaggtgctggagctgcgcgtgtcggaggtgggcgaccacgtgctggtggtcagcgtgacgtgccgcaagcgacgcgacgccatggccagggtgtgccgcgccatcgaggacctccggctccgtgtcatcactgccaacgtcacctccgtcgccggctgccacgtgcacaccgtcttcgtcgaggtacgtcgccggtggcatggcatttggcatcacatgggatcgggatactctgtttttttttctccttttttcatccttgacgatggatatgactga

SEQ ID NO: 76 - DNA, 990 bp, Zea mays
atgagctgcaacgggtgccgggtgctgcgcaaaggctgcagcgaggcctgcgtgctgcgcccctgcctccagtggatcgacgccgccgaggcgcagggccacgccaccgtgttcgtcgccaagttcttcggccgcgcgggcctgctctccttcatctccgctgtcccggacgcgcagcggcccgcttattattgcttaccaggcttactgtggtccatggcacctcctcgcagccctgttccagtcgctgctgtacgaggcggcggggcggaccatcaacccggtgcacggcgcggtggggctgctgggcacggggaactggcacctctgccaggccgccgtcgacaccgtgctgcggggcggcgccatcggcccgctgccggagcttggcgccgggacgggccacctgtacgggccccccgccgccaccgacaagcgcgccggcggctggtccaccttctccacggcgaagcgggcgcggaaggccgccgccggtgccggggcgccgcccgcggcggaggcggcggcgtactgcgacctagggctgtgcctcagcagcagccccgggtccccgccggcgacggcggacgggaggagggcccccctcctgcggcccggcacgccgtccatgagctcggacgagtccgtcacgaccacggccggcggcgacagggagcccgtgctgctcaacctttttgcctgatgaagccgccggtcgacgacgcaggccaaaccaaaccaaaccacacgcgcagcggctctcttgattggccgccgtgtgatgtgatgttttgtctggacgatctgtcccggcggccaggcgttttctctcgtcgccggcgacggcaaggccgtttttcattcgtttctggctgcggccttagattttatttttggttgcgtagtagcggtagtagaaaagaaactaccagtagcagccggagccggcctcgaagccccgtttgcgtgtgggcgaagatgagactatga

SEQ ID NO: 77 - DNA, 294 bp, Zea mays
atgtcgtcttggacctactgtgagaacgcgctgttcgagcgcgcgctggccacctacgaccgggacacgcccaggcggtgggagctcgtggccgccgcggtgggcggcgggaagaccgccgaggacgcgaggcgccactacgcccacctcgtgctggacgtcggcgacatcgagtccggcggctacgacaacccgaacccccgcgggcccgcccccaccaacagcggcggtgccagcatcagcgggaacggcaacaacaggggcggcggcagagccaaccggccccagacatga

SEQ ID NO: 78 - DNA, 1218 bp, Zea mays
atggagcgcgtcttctccgtggaggagatccccaacccctactgggttccgccgcaccctcaatcggcggccgccggcgctgttgctgcaccagcgggggaggcggcggggctgatgaaccggtgcccgtcggaatggtacttccagaagttcctggaggaggccgtgctcgacagcccggttcccgtagccggcgtcagtaggggcagcgttggagctggagttgaggctgcggagaggaagacaccggggaccgcggcggcggcggctgcctcgagctcggttgttgaccccgtggagtacaacgcgatgctcaagcagaagctggagaaggacctcgctgccgttgccttgtggagggcttctggtgcagcacctccagataattctccagctggttcatccttgccaagtgtggatgttccacatgcaggccctcttaaacccatgggaggtactggaagtctagttcaaaacaagctagctggtgctccaggcgggggatcaagtccacatgtagtacaaaatgccgatattcctgttaagcaaaccactagctcttcctcacgtgagcagtcagacgatgatgatatggaaggagatgctgagactactggaaacggaaaccctgttcaacaaagattacagagaaggaagcaatccaaccgagaatcagccaggcgttcgagaagcagaaaggcagctcacttgaatgaactggaggcacaggtagcacagttaagagttgagaactcttcgctgctaaggcgacttgctgacgttaatcagaagttcaatgaggctgctgttgacaatagggtgctaaaggcagatgtcgaaaccttaagagcaaaggtgaagatggcagaggactcagtgaagcgggtaactggcatgaacacattgttccctgccgtgtctgatatgtcgtccctcagcatgccattcaatggctccccatccgactccgcctctgatgccgccgtacccatccaagatgacctgaacagttacttcgccaatccaagcgagatcggaggcagcaacggttacatgccagatatagcttcctcggctcaagaggacgacgatttcgtcaacggggctcaggtcgccggcaagatgggcagcactgactcgctgcagcgggtggcgagcctggagcacctccagaagaggatgtgcggaggcccggcttcatcggggtcgacctcctag

SEQ ID NO: 79 - DNA, 1038 bp, Zea mays
atggggctggacgtcgtggagatcgggatgggcgccgatttgagcctggatctgaggcacttcgcctccaaggccgtgcggcagagcaaggactacgcgccggcgccggcgccggacatggacgcctgcatccgccgcctcgaggaggagcggggcaagatcgagatgttcaagcgggagctgccgctctgcgcgcgcctcctcgcagacgtgatcgatgtgatgaaggaggaagcggggaaggcggtggcggaggaggacggcgccgccggggacaagagcaagtggatgagcacggcgcagctctggacgggcgattgcggccgcgaggacgcggaaccagagaagcaagacaaggagaggagctcgcctgaggccaggtctcgcgccgccggcggcgctttcttgccgctcaaggctgccgtgggctccggcgcgccggcgttcgcgccgctcggcttgagaatggacgacaaggccgccgcgcgcgccgggatgcccgacctgtgcttgctgtcgccgccggcgaccaagagcgccgccgaggagagccgacgccaggtggtggggtttgcgcaggcggcgacgagggcggccgccgccacggcgccagctgccccttcgcttagcgttggcgtccagtccccgtcgcagcaggcgaggaaggctcggcgttgctggtccacggagctgcatcgccagttcgtcgccgccttgaaccagctcggtggcccccaagttgccaccccaaagcagatcagggagctgatgaaggtggacggcctcacaaacgacgaagtgaaaagccaccttcagaaataccggctgcacaaccggagggcgccagggtccggcgtggtgagccagcccatcgtgctggtgggagggctgtggattccgcaggagcaaagcagctcgcagtccgggtctccccacggcccgctccacttctccacctcaggcatcgcagtctcgtcggcggccaccgtcagctgcgaggaggaagacggacggtccgagagctatggctggaaatga

SEQ ID NO: 80 - DNA, 963 bp, Zea mays
atggagggtgacgagaagtcggcgggcggggcccctgcttactggggcctgggcgcgcggccctgcgacgcgtgcggcgccgaggcggcgcgcctctactgccgcgcggacgcggcgttcctgtgcgccgggtgcgacgcgcgggcgcacggcgccgggtcgcgccacgcgcgggtctggctctgcgaggtctgcgagcacgcgccggcggcggtcacgtgccgcgcggacgctgccgcgctctgcgcctcctgcgacgccgacatccactcggcgaacccgctcgcgcgccgccacgagcgcctccacgtggcgcccttcttcggcgcgctggccgacgcgcccaagcccttcgcctcggcggcgccgcccaaagcaaccgacgacgacgggagcaacgaggacgaggcggcgtcgtggctcctccccgagcccgaccacgggcagaaagaaggcgccacgacggaggtgttcttcgcggactctgacccgtacctcgacctcgacttcgcgcgttccatggacgaaatcaagaccatcggcgtccagcagagcgggtcaccagagctcgacctcgccggcaccaagctcttctactccgatcactccgtgaaccacagtgtgtcatcgtcggaggcagcggttgtgcccgacgcggcgtctggcatggcgcccatggtggcagtggtcagcaggggcctggagcgagaggcgcggctgatgcggtaccgggagaagcgcaagagcaggcggttcgagaagacgatccggtacgcgtcccgcaaggcgtacgcggagacgcggccgcgcatcaagggccggttcgccaagcgcacgcccggggctggggaggacacgctggaggagcacgaggagatgtactcctccgccgctgccgccgtggctgcgctcatggcccccggcggagccgatgcggactacggcgtcgtgcccacatattga

SEQ ID NO: 81 - DNA, 768 bp, Zea mays
atgctccgactcgttcctccccctgctcgccacgcccacggccactaccactcacacacacaggcagcagccatggacgccgccggctccttcagcgactactcctctggaaccccgtcccctgtcgccggcggcggcggcggcgacgacttcggctcctcctcctacatgacagtgtcatcggcgccgcccaagcgccgagccgggcggaccaagttcaaggagacgcggcaccccgtgtacaagggcgtgcggcggaggaaccccgggaggtgggtctgcgaggtgcgggagccgcacggcaagcagcggatatggctcgggaccttcgagaccgccgagatggcggcgcgcgcgcacgacgtcgccgcgctcgcgctgcgcggccgcgccgcctgcctcaacttcgccgactcgccgcggctcctcagggtgcccccgacgggctccgggcacgacgagatacgccgcgcggccgccgtggcggcggaccagttccgcccggcgcccgatcagggcaatgtggccgccgaggaggaggcggccgatacaccaccaccggatgccttgcccagcgtgacgatgcagagcgtcgacgacgacccgtactgcattatcgacgacaggctcgacttcgggatgcaggggtacctcgacatggcgcaagggatgctcattgatccgccaccgatggccggttcctccaccagtggcggcggcggcgacgacgatgacgacgacggtgaggtcaagctctggagctactga

SEQ ID NO: 82 - DNA, 495 bp, Zea mays
atggacaggccaggccaccaccagcaccattttttcatgccgccgccgccgcagcagcagcagcagcagctttgcgtgccgatgatggacgacccgtcgtcgttcttggcggagctgatgggcgtcggcggcggaggcggaggtgggccgtcgtcgtccgcgaggggggagaggaagcggcggttcacggaggagcagatacggtcgctggagtccacgttccgcgcgcgccacggccacgccaagctggagccccgggagaaggcggaactggcgcgggagctgggcctgcagccgcggcaggtggccatctggttccagaacaagcgcgcccgctggcgctccaagcagctcgagcacgactacgccgtgctccgcgccaagttcgacgacctccacgcccgcgtcgagtccctcaggcgcgacaagctcgccctctccacgcaggtagcttccgatccgcgatacagtgttcgctctgatgatgttctctga

SEQ ID NO: 83 - DNA, 1047 bp, Zea mays
atgatggacggcctccacaccgacctcgcgctggggctgctcgggtgcggcggcgtcggcgttggtagtagcggacgaggcgagcagctccagacagcgcccttcgtggccaagacctaccagatggtgtgcgacccgcggacggacgcgctcgtccggtggggcagcgagaacaacagcttcgtcgtcgtcgacccggccggcttctccaggctgctcctcccctgcttcttcaagcaccgcaacttctccagcttcgtgcgccagctcaacacatacgggttccggaaggtacacccggaccggtgggagttcgcgcacgagtcgttcctgcgtggccagacgcacctgctgccgcgcatcgtgcgccgcaagaagcgcggcgagggagcctgcacctcctccggcggcgatgcgcaggcgcagtacgcggcggcggcggccggctgctgcatcagtatgggcggcgaggaccatcgtacggagggggaggcggaggcggcggtgctcgaggaggtgcagcggctgcggcaggagcagacggccatcggggaggagctggcccagatgagccggcgcctgcaggccacagagcggcggcccgaccagctcatgtccttcctcgccaggctcgccgaggaccccgacggcgtcacgcgccacctcgtcgagcaggccgccgagaagaagcgccgccgcatgatgcagctcgcctcccagcccgtccgccgcctcccgcctccgcctccgccaccgccagtactccaccacccgctgctggcgctcggaggcgccgccgccgccgccgccaagggcctggacggcggctgccaatgggcggagcagaagaagccgtctgtcgtgctcaccgccgccttcgatcatcccgccgccagctactgcggggcgcagcatgctgtgccgaatctcggaggcggcaacggcggcggcggcatcaacggcatgggcctgaccgctgacgagaccgcggtagagaccacgacgacccccttcccgttctgcctgctcggccagggtttcttttga

SEQ ID NO: 84 - DNA, 582 bp, Zea mays
atggcggcgcaggagcaggagcacgagaagcagcaggcgaagacgagcaccacgagctcgctcccctccagcagcgagcgctcctccagctccgcccccaacaaccttagggaaggagctgaagctgccggcgcaggcgtggagagcgacgaggagatacggcgggtgccggagctgggcggcgcgtcggcgtcggcgtcggcctcgtcgggcgcgggcaaggaggacggcgcgcgggcggtggccgcgggggcgcaggggcaccctccggcggccgggaagaagcgcggccgcgccccgggggacaaggagcagaaccggctgaagcggctgctgcggaaccgcgtgtcggcgcagcaggcgcgggagcggaagaaggcgtacctgacggagctggaggcgcgggccaaggacctggagctccgcaatgcggagctcgagcagcgggtgtccacgctccagaacgagaacaacacgctccgccagattctgaagaacacgacggcgcacgcgagcaagaggagcggcggcggcggcaagggtggagacggcggcaagaagcaccacttcgccaagagctaa

SEQ ID NO: 85 - DNA, 939 bp, Zea mays
atgtactcaccaaaaccagagtctagttttggcccaaatcccaactcaggtacacaccagcagcaaatggaattaactggggccaacatgggtcctggtaatggagcaaataacaataccaacatggctgggaggcaacgcttacgctggacaaatgaactgcatgaaagatttgttgaggctgttactcaacttgggggtcctgatagggcaactccaaaaggagttctgagaattatgggtgtacaaggattaacaatataccatgtaaaaagtcacttgcagaaatacagactagcaaagtatattcctgatgcttcaactgatgggaacaagaccgataacaaagacccaggagatttgcttgccggacttgagggatcctctggattgcagatatctgaagccctcaaactgcagatggaggtccaaaagcggctgcacgaacagttagaagtacaaaggcagctgcagttacgaattgaggctcagggaaagtacctccagaagatcatcgaagagcagcagcgcttaacaggtgtgaaatctgaaactcctgctggaggtgcttctgtcactgtatcaagtgatcaattcccagactcggagcggactgagccctccacacctgcaccagcatccgagtctccaactcaagttggtgcttccaatagggacactggagaccgaactgaagcaaccaagagcacctgtcatggtgattctctttcccgcaacgagccactaacccctgattccaactgccagaacggttctcctgtcgctagtccaaaccatgaaagggcagccaagaggcagcgaggcagtggtactgaattcttagattctgaggctgagttttcccttccgcgccacatcttcgagtcgagttcaggctcagagttccaacaatactcaatgtcctactcaggacagtag

SEQ ID NO: 86 - DNA, 1092 bp, Zea mays
atgtgcggcggcgccatcctgtcggacatcatcccgccgccgccaccgcggcgggtcacggctggccacctctggcccgagagcaagaagccgaggagggctgcatccggcaggaggggagcccccgtggagcagcatgagcaggaggaggatttcgaggccgacttcgaggagttcgaggtggagtccggcgagtcggagctcgagtccgaggacgagcccaagcccttcgccgcccccaggagcgcgctcgccagaggtggactaaacactggtgcagctggtgtcgatggccctgctgcaaattcagttaaaaggaagaggaagaaccagttcaggggtatccgccggcgcccgtggggcaaatgggctgctgagatcagagatcctcgcaagggcgtgcgcgtctggctcggtactttcaactcccccgaagaagctgccagagcttacgacgccgaggcacgcaggatccgcggcaagaaggctaaagtcaacttcccggatgaggttcctacggcggtttctcagaagcgccgtgctgctgggcctgcctctctgaaagcgcctaagatggacgttgaggaggagaagccgatcatcaagctcgcagtgaacaatatgaccaactcaaacgcatatcactaccctgccgtcgtcggccacaacatcatacccgagccattcatgcagactcagaacatgccattcgctcctctggtgaattatgctgccctagtgaacctgtcttcagaccaaggcagcaactcgttcggttgctcggacttcagcctcgagaacgactccaggacccctgacataacttcggtgcctgcgcccgttgccaccttggccgccgttggcgagtctgtgttcgtccagaacaccgccggccatgctgtggcgtctcctgcgacggggaacactggtgttgatctcgccgagttggagccgtatatgaatttcctgatggacggtggttcagacgactcgatcagcactctcttgagctgtgatggatcccaggacgtggtcagcaacatggacctttggagcttcgaggacatgcccatgtctgctggtttctactga

SEQ ID NO: 87 - DNA, 1557 bp, Zea mays
atggaaggcgggatgtcaagtttggaagccgccatgaaagcttcttcatcgatggcaagcagcatggcaaggaatgctgaccctaaccaacagactctccgccccaatttagtggagcagttctattttccaagacctggtcaatctttgccaggcattcctccattttttgggcctccctctagtttgtatcttcctaatgacaatgaagctaaatttggcaacaactttgaatcaaatccttcacagaatacagattggaacccacaggcaatagtgagcaacctaaccttccttgagcagaagatcaagcaggtaaaggatattgtgcagtccatgagtaaccgagagaaccaagtagctggtggttcctgtgaggtagctgcaaagcagcagctcataaccgctgacctcactagcattataatccagctcatatctactgcgggttcgctgctcccttcaatgaagaacccacttcttagcagcaatccagcagtcaggcagcttggcaacactcttggttctcctacgggctttggcatgaatgctaatcagcgaccaagcgtagacagcaagaccgatattcctgacacaggaaaaacttctgattatgaggagctgatgaatacccttaatactagtcaagctgaaagagatgagctgatcaaatgcccaaatccctgtggtggggaagggtctgaactgactccgatggaggaccatgatgtgaaggagagtgacgatggtggtgagggagagaatctcccccctggttcatatgtaatcttgcaactggaaaaggaggagattttagcaccacatactcatttctgcttgatctgtggtaagggtttcaaaagagatgctaacctaaggatgcacatgaggggccatggagatgagtacaagactccagctgctcttgccaaacccacaaaagattatggtgcagatcatgcaccggttacaaggtactcatgcccatttgtgggttgcaaacggaacaaggagcacaggaagttccagcctctcaaaacaatcttgtgtgtgaagaaccattacaagagaagccactgtgacaagagctacacctgcagccgttgcaacaccaagaagttctctgtcatcgcggacttgaagactcatgagaagcactgtggtcgtgacaagtggctctgttcttgcggaacgaccttctccaggaaggacaagctttttggacatgttgcgcttttccaaggccacacacctgcgctccccgtggaagacggggatgtaccagaaggttcagagcagcctcaggacggcgaaccaacgaatgaaatggcgaggagcatggtgtatagcttcccgtgtagctcgtctgatggtttattgaacctcgacatgaaaatggctgatgacgtgcgtggttatctctcgccgctgagctttgataattgctttggcgcgtttgacgacttcactcgccctggatttgacatctctgagaaccccttctccttcccgccttcaggatcttgcagttatgggcagcagaacggtgatagctga

SEQ ID NO: 88 - DNA, 1608 bp, Zea mays
atggaagagggaggcgacccgcagcttccgagcatctccgcacgcaccacgtccgaaggcgcggggggcgtcgacttggatctccttgagcagctactgtctgacgacaacggctggctcgagacgggtggcgcgagcccctcctccgtggaggagcagttcagccaggccctgtcctacatccgagatacgcagagcgacggcgacgtcctcgtgcagctctgggtgccggtcaaccacgatgacgggaaactggtgctgaccacaagcgagcaaccgttcacgctcgaccaccgctccgacagcctcctccggttcagggaggtgtccaccaagtaccagttctcggccaatgttaagtcgggggattcgccggggctgtcagggagggtctttatcggcaggctccccgagtggtcgccggacatcaggtacttcaccagctacgagtatcccagggtaagggatgcacaatacctcgatgtccatggcaccatgggtctgccagtgttcgagaagggaagctacaactgcctgggcgtcatcgagctgatcatgataaggcagaagataaacttcacctctgagctcaacaccatttgcagtgctctccagttcagcactgcttcctacaaagatgctttaccagagatactggaggtcctgagagcagcctgcttgacccacaagctgccattagctcagacatgggtcacatgtgctcaacaagggaaacgaggcaaccgacattccgacgagaactaccggtactgcatctccaccattgatgaagcatgctttgtgaatgaagccgagatgcggggcttccatgagacctgctccgagcaccaccttctgcgtggggaggggttaaaaggtgcagtggcgatccgcctgcggtgcacacgcactgggacaacagactttgtgctggaattctttctgccaacagattgtgaagcactggaggaccagaacatagtgctggactccttgtcaggcaccatgcgaagtgtttgccagaccctacgtgtggtcacaaatagagagatggaagacgaagcggtgctggaaatgaacgagctgaactcttttactcctcatgggaaggacaaagttgagttgtcctttggaggcaattcagcagatcgtagaggagaggcctcttggacaagtctggcaggaacatcacagcaagaatctgagttagctgcattgcggatgcatggaatgttctcacctggggggcagggtccatctctatctggtgttcaggcaactgctgaaggtagcaaggcaaaaaggcgtacaaaggccgagaagaccgttagtttgcagattcttcggcagtactttgctggtagcctaaaagatgcagcaaggagccttggaggtgacaactcaagatcagcaggcataatgtcactcagtagattgtgtgtatatggatcatcatctatcacctatgtgctctccgcccgcggaacttcaggtgagctcgtgctctttgtgcgtcgacctgaaatggtgcttgattacggcggaattcaaccacttctattcaactctctaagttctttgacgaaatggatgaagatggaaatttga

SEQ ID NO: 89 - DNA, 1128 bp, Zea mays
atggactcaacgctgaaccaggtgaaggaggagagccatggggagggaggagatttgatggcaggcacggtggaggccgcggatgggccgtccgcggccgtcgccgcggcaccaaagccgatggagggtctgcatgaccctgggccgccgccgttcctcaccaagacatatgacatggtcgacgactcggacaccgacctgattgtgtcttggagcgccaccaacaacagcttcgtggtgtgggatccgcacgccttcgccacggtgctgctgcccaggcacttcaagcacaacaacttctccagcttcgtccggcagctcaacacctatggtttcaggaaggtggatcctgatcggtgggaattcgcgaatgagggctttttacggggacagagacacctcctgaagaacatcaggcgtcgaaaacctcctgctcagaatgccacaaaccagcagtccattgggccttaccttgaggtgggacattttggatatgatgcagagattgacatgttgaagagagacaagcagttactgatggcagaagtggtgaagctaaggcaggagcagcagaacacaaaggcaaatctcaaagcgatggaggataggctacaagggactgaacagaagcagcagcagatgatggcgttcttggcacgtgtcatgcggaatcctgaattcttgaagcacctggtttcccagaatgagatgaggaaggagcttcaagatgctatttcaaagaaaagaagacggcgcatcgaccaagggcctgaagctgatgacttgggggctagtagcagcttggagcaaggttcaccggtcctgtttaatgcccaggacccagttgaattccttgtcgacggaatcccagctgacctcgagagcccagctttcgatggccacggcctgattgggccacatgatattgatattgatattgatattggcagtacctctgagcagcagcaagacatgccccaggaggatctgaatgacaacttctgggagcagttgctgaacgaaggacttggcgaggagaacgatagccctgtaatcgaggatgatatgaatgtgctgtctgagaagatgggttatctcaactcagatggcccaacatctagcaattag

SEQ ID NO: 90 - DNA, 687 bp, Zea mays
atggtgcggggcaagacgcagatgaagcggatagagaacccggccagtcgccaggtcaccttctccaagcgccgcaacggcctgctcaagaaggcgttcgagctctccgtcctctgcgacgccgaggtcgcgctcgtcgtcttctccccgcgcggcaagctctacgaattcgccagcggaagtgcccagaaaacaattgaacgttatagaacgtacacaaaggataatgtcagcaacaagacagcacatcaggacattgagcaagtaaaagctgatgctgagggcctggcaaagaaactggaagcacttgaagcttacaaaagaaaacttttgggtgagaggttggaagaatgctcctttgaagaactgcacagtttggaagtgaaactcgaaaagagccttcattgcatcaggggaagaaagactcagctgctggaggagcaactccataagctgaaggagaaggagatgaatctgcgcaagagcaacgaagatttacgtgaaaagtgcaagaagcagccgccgccgccgccgcctatgctgatggctcctccgccgcctccagcgccggcagccatcgatcacacggggccgaaggatgtcgggatggacgtggagacggagctgtacataggattgcccggcagagattaccgctcaaacaacaaagacatgactgcacagtag

SEQ ID NO: 91 - DNA, 2052 bp, Zea mays
atgggcatcgatctcaacatggtggacggcgagggccacgagcgccgcccgccgccggtgacgtgccgggagctgtggcacgcgtgcgcggggcccgtggtcgcgctaccgcgccggggcagcctggtcgtgtacctgccgcagggccacctggccgcggcgggcggcggggacgtcgctgcggacctgccgccgcacgtggtgtgccgcgtcgcggatgtcgagctatgcgcggatgcggcgacggacgaggtgtgcgcgcggctggcgctggttgcggagggcgaggcattcgggaggaatctgggcggtggtggagttgaaggggacgatggcatggaagatttcgatgctgaaaggaagtccgggatgctgcacatgttctgcaaaacgcttacggcctctgacacaagcacgcatggagggttctctgttcctcgccgtgctgctgaggactgtttcccgcctctggattataatcagctcaggccttctcaagagctggttgccaaggatttgcatggagccaagtggaagtttcgtcatatatataggggtcagcctcgtaggcatctcttgactactggatggagttcatttgtcaataaaaagaaactggtttcaggggatgctgtgttatttctccgaggtgatgacggtgaactaaggctgggtgtgcggagggctattcagcttaaaaatgaggccctttttgaagatttcaatagtgacagcacaaagcggcattctttgacggctgtagctgattccttgaagaacagaagtgtttttcacatttcttacaatccaagagctactgcttcagaatatattattccatacgctaagttcctgaagagcctcaatcatccggtctgtattggagcaaggatcaactttcagtgccataatgaagatgttagtgaaaggcgatctggagtggttgttcgcattagtgaaatagatcccatgaaatggcctggctcgaagtggagaagcctgctggtaagatgggaggacggtgctgaatgtaatggccaagatagagtatctccatgggagatcgagatagctggtggttctgtctctgtttctcattctctttctgcatctagttctaaaagaaccaagttgtgtcctcagggaaatttggacgttccagcaatgtggaatggttgtactgactccatggaaactggaaagttacccagggtcttgcaaggtcaagaattgatgagttttaggacttgtcatgttccgtgtgctcctcaaactgctgaggctgcaaaacttcaatcttctgatgctagtaggttccttagtaatgcacatggctgcgcattgggtggtccaacaagcagactcgcagtgcatagctctggttttacctaccaatgtgtaggcttcaatgaatctattggattctcagaggtcttgcaaggtcaagaaatttctcgggcggttcctaagttccaaggaatgatgtcggaagcttgttcactgaaagacagatatgggctgcatagttatatgcgtgccccagttgctgttaatggattatcagctacaactcaagaatgttctctcgcactatctactccgccaggagcacaagtgccctctctctaccctggtaatgttgttaaccgaactgtggttccacaacttggactggcaaggaagtttggtggtggaggtacaaatggccagcagtctggcccatttgataggccgagggaactttggaccaggccacagcatgaaacacctgaccaaatgaacttggatcagtttgagactagaagaccttcagtgcctgtagatgctgctaagcttgggtctggtggaggggaggttcgcaaaactagctgcagactttttggtttctccttgactgaaaagatcttgccagcagatgatgatgacgtcaaggaagtgagctatgagactgagtgccagaacccacggatgctggacctgttcgggtacaactgctcaacaccgagtgccgctcttccagctctgtgtgctgccgccccctttggaatgtga

SEQ ID NO: 92 - DNA, 1149 bp, Zea mays
atggaggcagatagcatggtggccatgggctgcggaggtttctactggcagtcgcctccgcgcttcctccttgaacccctcgacctagccgacatcgtcgacagcagcatgtacgtgccgacgaacgaggctgatgagcccgtatccgggctctgctcatcgaaccggccggcggaggattactccagttcggccgagggcgccaactcctgttccgcggcggtggttccgtcgccgccgccgcctccgggcgtgacgacgacgacgacgaggaacatggacatggagaggacccgccgcaggaagctcaacgagaggctctacgcgctccggagcgtcgtgcccaacatcaccaagatggacaaggcgtccatagtcagggacgccatcgcccacatcgagcatctgcaggagcaggagcgccgactgctcgccgagatatccgttctccagtcttctgacgacggcaccgccgccgccgccgccgtcaagacggaggacgctgccgccactgggggtgctgcgtacgacgtcgacagcgtcccctggaggaagaagccgagggcggtgccactgccgtccgtgtatttcaccgacaacccgacgagctccatctcgtcatctccgccagtccgaatcctggaggtgcaggtctcgcaggcaggggagagggtggcggtggtgagcctctggtgcagcaggggcagggacgccgtgggcaagatttgcctcgcactggagccgctgcgcctccgggtcgtcacggccaccatcaccgcgcgcggcgacactgtcttccacacactgttcgtggaggtaattaagcagcctgctaactacagcttgccgcacgacggaaattactgtggttgcccttgtacgtgtgcgtgcctacctgagaagtcagcttcggcactcgcgaaccgatggcgtcaccggggtgacgtcgcgcgggatgacgtacggaatggtgctccgttgtggttgtcgtcgtcgtcctttcggcaaaaattaggagccggagtagatgttggtctcgaggtttcatcagtgctggccgatcgacgactagtaaagtacgtcaagtttctgcgtgggaaacgggcgcgcgacattttatattttgttctactgacggtgaaggattga

SEQ ID NO: 93 - DNA, 639 bp, Zea mays
atgagctgcaacgggtgccgcatgctgcgcaaggggtgtagcgacgcgtgcgtgctgcggccgagcctgcagtggatcgacggcggcgccgaggcccagggccacgccaccgccttcgtcgccaagttcttcggccgcgccggcctcatgtccttgctcaccgccgtccccgagccgcagcgcccagcggtgttccagtcgctgctgtacgaggcggccgggaggacgatcgacccggtgagcggcgccgtggggctgctcggcgcggggagctggcacctgtgccaggcggcggtggagacggtgctgcggggcggcgccatcgccccgctgcccgagtccgactccgacggggcccgccgcggcgcgtccgctgtggcggcgaggcgggccgtggggtgctcgacgttctcgacggcgaagcgcgcgccggcgagcgtgggggcgccgccggagccgtcgtgcgacctcgggctgtggctcagccccgggtcacccccggcgaccggggagcggcgccggcggcggcggcccggcacgccgtccatgacctccgaggagtccgtgacgacgatgagcggcggcggcggaggcggaggcggagggagggagcccgagctgctgaacctttttgtctga

SEQ ID NO: 94 - DNA, 429 bp, Zea mays
atgtcgtcggcgtccaactcggccaagggctcgtcgccgtcatcgtcgacgtcgtcccagtggacgaagccgcagaacaagctgttcgagcgcgccctggcggtgtacgacacggacaccccagaccggtggcacaacgtggcgcgctacatggggggcaccacgtctgtggaggaagtgcgccgccgctaccagcagctcgccgtggacgtcgcgcagatcgagtccggcgaagtgcccttccactactggtacgccgccgccccgccgctgcatccagcgacattagttatgagcatgtgtgatctaagcacaatatatatggtgttccgctcgatgtcgtacagtaaggttgcagtgttaatcaccatcactaaggaccaaccgtcgaaaagtagcaggaagaagtcgcaaccgtgggttttttaa

SEQ ID NO: 95 - DNA, 1122 bp, Zea mays
atggggctcgacgtcatggagatcgggatgggcgccgatttgagcctggatctgaggcacttcgcctccaaggccgtgaggcagagcaaggacgacacgccggcgccggacatggacgcatgcatccgccgcctcgaggaggagcggggtaagatcgagatgttcaagcgggacctcccgctctgcgcgcgcctcctcgccgacgtcagcacaggatctgtgggggtgctgtcgggtgctcgattcgtcggtgggcctaaaagttttggagctttgcgatcgcagaagcaagacaaggggcggtgctcgccggaggccaggtcccgcggcgctctcttaccgttcaaggctgatgtgggctctggcgcgccggcgttcgcgccgctcttcttgagaacggacgacaaggctgcggctgcgcgcgtcggggtgccggatctgtcgtccttgctgtcgccgccggcgaccatgcctcctgcggacgccggcgccgaggagagccgtcgccagaaagaaacattgagttcattcatgctacgccatgcctgcagttgccacgccgaagcaaatcagggagctgatgaaggtggatgggctgacaaacgacgaagtgaaaagccatcttcagaaataccggctgcacaaccgcagggcgcctggatccggcgtggtgcgccagccgatcgtgctcgtgggagggctgtggattccccaggagcaaggcagccctcagtctggatctccccacggccccctccaccacctgtccacctcggtggccgccgtctcgtccgccgccaccgccagctgcgaggaggaagacggccggcggaggaaaggcggcagtgcacagcgacagagacgaagacttttggaatcgtccttgggtggatggatggacggacgaacgaggcggggccgcgagctctgaatattcgccgccgtcgatgcatcggcggcctgcctgtcgctctcgacggagagggtggtactggtgtgcgcaaccggacaacgcaatgttcaggccagaagaatcggaatcggaatatcatattccgtctgataaatactatgagggaagaatggaggggatatgaggatatcctcgttgattctgcttga

SEQ ID NO: 96 - DNA, 1095 bp, Zea mays
atggagctgcacaagtactggggcgtggggggccggcggtgcggcagctgcgagggggccccggcggcggtgcactgccgcacgtgcgttggtggatccttcctctgcacgacgtgcgacgcccggcccgcgcacgcgcgcctgggccacgagcgcgtgtggatgtgcgaggtctgcgagctggcccccgccgccgtcacgtgcaaggccgacgccgccgtgctctgcgccgcctgcgactccgacatccacgacgccaacccgctggcccggcgccacgcgcgggtccccgtcgcccccatcggctccgaggccgccgccgcggccgtggaggccatgctgttcgggaccggcgaggcggccgcttccgaggccgacgagcagcacgcggcggccgagcacgcgcacgcgcacgcgcacgcgctgaacctcaacgtggaggccaaggacatgaagctggactacctcttctctgaactggatccctacctcagcgtcgagatcccgcgcttccagcacgctgacagcgtcgtccccaacggcgccggcgctgccgtcgagctggacttcacgtgcggcatcggcgttaagcactcctcctacagctcctacacggccacctccctcgctcatagcggctcctcgtcggaggttggcgtggtgccagaggccttcggcggcagcggcagcggcggcgggagctttgagctcgacttcacaaggcccaagcctcaggcctacatgccatacaccgggactccccagagccacagcgtgccatccgcggacgtggaggtggtgccggagcggggagacttggctgcggtgaggccggtgccgctgatgggggagagcagggaggcgcgcctgatgcggtaccgtgagaaaaggaagaacaggcgcttcgagaagaccatccggtacgcgtcccggaaggcctacgccgagacgcggccgcgaatcaagggccggtttgccaagcgtgctgaccacgacggggacgccgacgccgacgacgctgaggccgaggccgaggccgccgtgccgatgtcatatgtgctcgacttcggctacggcgtcgtaccgagcttttga

SEQ ID NO: 97 - DNA, 717 bp, Zea mays
atgtgtccgaccaagaaggagatgagtgccgagtcgtcgggctcggcgagcagctggacttcggcctcggcctcggcctcgacctcgacctcgccggagcaccagaccgtgtggacgtcgccgccgaagcggcccgcggggcggaccaagttccgcgagacgcggcaccccgtgttccgtggcgtccggcgccgcggcagcgccgggcggtgggtgtgcgaggtgcgcgtgcccgggaggcgcgggtgcaggctctggctcggcacgttcgacgccgccgaggccgccgcgcgcgcgcacgacgccgccatgctcgccatcgccggcgcgagcgcgtgcctcaacttcgccgactccgcgtggctgctcgcggtccccgcctcgtacgccagccttgccgacgtccgccgtgcggtcgccgaggccgtggaggactttcagcgccgcgaggcggccgccggggacgacgcgcgctcggccacatcgccgacgccgtccacctcgggcaccgacgacgatgctgccactgacggcgaggagtcgtcaccggccacggaggtctcgtcgttccagctcgacgtgttcgataacatgagctgggatctatactacgcgagcatggcgcagggaatgctgatggagctgccgtccgcagttccggcgttcggagacgacggctacaccaatgtcgccgatgtgccactgtggagctactag

SEQ ID NO: 98 - DNA, 720 bp, Zea mays
atggagggcgacgacgacggcccggagtggatgatggaggtgggcggcgcgggcgccacagggaagggaaaaggcggcgcgctggacaagaacaagaagcgcttcagcgaggagcagatcaagtctctcgagtccatgttcgccacgcagaccaagctggagccgcgccagaagctgcagctggcgcgggagctcggcctgcagccgcgccaggtcgccatctggttccagaacaagcgcgcgcgctggaagtccaagcagctggagcgcgactactccgcgctccgcgacgactacgacgcgctcctctgcagctacgagtccctcaagaaggagaagcacacgctcctcaagcagctggagaagctagccgagatgctgcacgagccgcggggcaagtacagcggcaatgcggacgccgccggcgccggggacgacgtgcgctcgggcgtcggcggcatgaaggacgagtttgcagacgccggggccgcgccctactcgtccgagggcggtggcggtggcaagttcgcgcacttcacggacgacgacgtgggagccctcttccggccgtcgtctccgcagccgagcgccgctggcttcacctcgtcggggccgccggagcaccagccgttccagttccactccggctgctggccatcgtcgacggagcagacctgcagcagctcgcagtggtgggagttcgagtccctcagtgagtga

SEQ ID NO: 99 - DNA, 996 bp, Zea mays
atggacggcctccacaccgagctcgcgctggggctgctggagtgcggcgttgttggcagcggaggcgagacagcgccgttcgtggccaagacctaccagatggtgtgcgattcgcggacggacgcgctcgtccgatggggcagggggaacaacagcttcgtcgtcgccgaccccgccggcttctcgcggctgctcctcccctgcttcttcaagcacagcaacttctccagcttcgtgcgccagctcaacacatacgggttccggaaggtgcacccggaccggtgggagttcgcgcacgagtcgttcctgcgcggccagacgcacctgctgccgcgcatcgtgcgccgcaagaagcgcggcggtggaggaggagcctgctcgtccggcggcgatgcgccgcaggccggctgctgtatcagcaccatgggcgaggatcatcgtccggaggcggatccggacgagaagcaggaggcggatgccgaggcggctctgctggaggaggtgcagcggctgcggcaggagcagactgccatcggggaggagctggcccagatgagccggcgcctgcaggccacggagcggcggcctgaccagctcatgtccttcctagacaggctcgcggaggaccccgacggcgtcacgcgcaaccttgtcgagcaggccgccgagaagaagcgccgccgcatgcagctcgcgtcccagtcgcagcccgcccgcccgccgctcccgccggcgccgccgccaccggtgctccacccgctgctggcgctcggaggcgccgccgccaagggcctggacggctggcagtgggcggagctgcagaagccgtccgttgtgctccccgccttcgatttcgatcccgccgccagctgctgcggggcgcagcatgcgccgaatctcggcggcgccggcatcatcggcatgggcctgactgctgatgagaccacggtagagacccccttcccgttctgcctgctcggccagggtttcttttga

SEQ ID NO: 100 - DNA, 591 bp, Zea mays
atggctgcgcaggagcaggagcaggagcaggagaagcagcaggcgaagacgagcaccacgagctcgctcccctccagcagcgagcgctcctccagctccgctcgcaacaacctcacggaaggaggggcggagagcgacgaggagatacggcgggtgccggagatgggcggcgcgtcggcgtcggcctcgtcgggcgccggcgcggacgagcgtcccaagggggaggacggcaagcaggggcaggtggcggcgggggcgcagcctccggcgggcgggaagaagcgcgggcgcacggcgggggacaaggagcagaaccggctgaagcggctgctgcggaaccgcgtgtccgcgcagcaggcgcgggagcggaagaaggcgtacctgacggagctggaggcgaaggccaagggcctggagctccgcaatgcggagctggagcagcgggtgtccacgctccagaacgagaacaacacgctccgccagattctgaagaacacgacggcgcacgcgagcaagaggtccggcggcggcggcggcggtggcggcaagggcggagacggcggcaagaagcaccacctcgccaagagctag

SEQ ID NO: 101 - DNA, 774 bp, Zea mays
atgatgtatcatgcgaagaatttttctgtgccctttgctccgcagagggcacaggataatgagcatgcaagtaatattggaggtattggtggacccaacataagcaaccctgctaatcctgtaggaagtgggaaacaacggctacggtggacatcggatcttcataatcgctttgtggatgccatcgcccagcttggtggaccagacagagctacacctaaaggggttctcactgtgatgggtgtaccagggatcacaatttatcatgtgaagagccatctgcagaagtatcgccttgcaaagtatatacccgactctcctgctgaaggttccaaggacgaaaagaaagattcgagtgattccctctcgaacacggattcggcaccaggattgcaaatcaatgaggcactaaagatgcaaatggaggttcagaagcgactacatgagcaactcgaggttcaaagacaactgcaactaagaattgaagcacaaggaagatacttgcagatgatcattgaggagcaacaaaagcttggtggatcaattaaggcttctgaggatcagaagctttctgattcacctccaagcttagatgactacccagagagcatgcaaccttctcccaagaaaccaaggatagacgcattatcaccagattcagagcgcgatacaacacaacctgaattcgaatcccatttgatcggtccgtgggatcacggcattgcattcccagtggaggagttcaaagcaggccctgctatgagcaagtcataa

SEQ ID NO: 102 - DNA, 1257 bp, Zea mays
atgtgcggcggcgccatcctctcgggtttcatcccgccgtccggggtggcggcggcggcggcggcggccaagaagcagcagcagcagcagcagcggtgccgtgtgactgcggacctgctatggccggggcccggcagtaagggagctccccaggacaaggaggaggacttcgaggccgacttccgcgagttcgagcgcggcctcggcgaggatgacgtggacagcgccggcgaaggcggcgaccccgaggtccaggagcttcctccgccggagccgacgaggtttgccttcgccaccgcggccaaggcggcagttgatggcgtgatgactcctcctccaaaggatgtccaaggagatagagcagtaaaaaagcgcggccggaagaaccagtacaggggaatcaggcagcggccttggggcaaatgggcagctgagatcagggaccctaacaagggcgtccgcgtctggctcggaacctacaacaccgccgaggaggcagctagggcatacgacgccgaagctcgcaagatccgcggcaagaaagcgaaggtgaattttcccgatgacgcgacaggcactcgtcacaggccaacgaccgatgagatctttaacaacctgaagaacgacgacaacaacaacaacgatgatctgtttgcgatgtttgcgttcggtgacaataagaagaaggttcctgcagcgaagccagccgccgccgagggtggcagtggcagtggcagcttcctcgtccctgcgcctgcggtggcggtggtgcccggtaataagaggaggtcgtccgcgaccaacactatgctctccgtctccgacgaccagcgcagcaactcctacggctccggctcctccgacttggtggggtcgtggtcgtgggacgacgacgcggcggccgccgccatgacctcggactacacctcctcggtcttcgctcccgataacgccgtgctgccggcggcgtcttacacgcaaggcggagcgccgaagagaatgaggagcagctacggcggcgcgccgcccagcctcgcacatgacgcggccatgcctggctttggccttgataaagtgagctaccaccactaccaggcgttgcctccttattacgtcgggagcagcaacgcgtcggtgggcaacctcggtcttctgcagcaggctgatgatgctccagctccacaggatggggcgagcgccggggatatctggagcctcgacgagctgctcatgctggcagcagctggtgcttattga

SEQ ID NO: 103 - DNA, 1404 bp, Zea mays
atggataaccacatccatagtcagccagctgctaacctctactaccagttcggcatggggactgagcagcaatacccaccaccgttcgcctcaccaccatccaccaacatcccgcacatggactggaacccggccacgatgctagacaacctcaccttcatcgaggagaagatacagcaagtgaaggacgtcatccgcacaatggtggacaacgccgggcaggtgcaggtccagtgccaccaccaagcaggcgagctgctggctcagaagcagaagcagcaggtggtcaacgcggacctgacatgccttatagttcagctcatctccaccgccggcagcctgctcccgtcactgaagaactcgtcgttcctcagccacccccaccctgctggccacgtggacatggctaaccatgttggcccaagctcgagcctagtgcctaatgcgatgaccgtttctgaagactatgaggagctgttcaagggatggaccgatggcggcattgaggtcgacgacgacggcgttcttgtcgaggagcaggaaattaccaaggacggagacagcctctcgtacgagctgctgcagctggaggaggacgagatactggcgccgcacacgcacttttgcaccatctgcgggaaagggttcaagcgggacgcgaacctgcggatgcacatgcgagggcacggcgacgagtacaagagcccggcggcgctggccaagccgccgagggacccgggcgcggagcaggagccggcgaagcggcggtactcgtgcccgttcgcggggtgcaagcggaacaagctgcacaaaagcttccagcccctcaagaccatcctgtgcgtgaagaaccactacaggcggagccactgcgagaagagccacacctgcggccggtgccacgccaagaagttctccatcgtggccgacctgaggacgcacgagaagcactgcggccgccgggacaggtgggtgtgctcctgcgggacgagtttctcgaggaaggacaagctcttcgcgcacgtcgccttgttccaaggtcacacgcccgcgttgtcgtcgccgctggaggaggagccgccgaaggcttgctcggaccagcaccagaccggccgtgctgggagccgtcgggaaccagcgaaagtcccagctggctcagtgggcggcggcagcggcagcagcttcgtgtggggtgcctcgtcctcaggggagaacagtgctctggatatcaaaggttttgttgatggatgcagtggtgacttcctctcgacggcgaactttggctccttcaacctcagcttcgggcctgctgacgggttcacaggagagccttctagtggtggttcgttctcgatgctacctcctgagcactttcagagtgctcagaagaaggggcagaactga

SEQ ID NO: 104 - DNA, 915 bp, Zea mays
atggaagcgggtatggacgtatggttggattcctgtgtggcgcaactgggccctcgcgagcaaccgttcacgctcgaccaccgctccgacagcctcctccggttcagggaggtgtccaccaagtaccagttctcggccgatgttaagtcggcggattcgccggggctgccagggagggtctttatcggcaggctccccgagtggtcgccggacatcaggtacttcaccagctacgagtatcccagggtaagggatgcacaatacctcgatgtccatggcaccatgggtctgccagtgttcgagaagggaagctacaactgcctaggcgtcatcgagctgatcatgacaaggcagaagataaacttcacctctaagctcaacaccatttgcagtgctctccagttcagcactgcttcctacaaagatgctttaccagagatactggaggtcctgagagcagcctgcttgacccacaagttgccattagctcagacatgggtcacatgtgatcaacaagggaaacgaggcagccgacattccgacgagaactaccggtattgcatctccaccattgatgaagcatgctttgtgaatgaagccgagatgcggggcttccatgaggcctgctccgagcaccaccttctgcgtggggagggggttgcagggaaggcctttacaacaaaccagccatgcttcttgccggacattggatcctcaactaaattggaataccccttgtctcaccatgctaagatcttcaagttaaaaggtgcagtggcgatcctcctgtggtgcacacgcactgggacatcagactttgtgctagaattctttctgccaacagattgtgaagcactggaggagcagaagacagtgctggactccttgtcaggcaccatgcgaagtgtttgctag

SEQ ID NO: 105 - DNA, 1080 bp, Zea mays
atgagccacgggaacgggatgttgaattctgtcaaggtggagaggtggccagcagcagtcgctgcaaatggccagcctaggccgatggatgtgctccacgacggcagctcgccgccgttccttaccaagacgtatgacatggttgatgacccaaccacgaacgccgttgtgtcatggagtgccgccaacaatagctttgtagtttgggatcctcatatctttgggacggtgctgctgccaaggtacttcaagcacaacaacttctccagctttgttcggcagctcaatacttatggcttcagaaaggtggatcctgacagatgggaatttgctaatgaggagtttctgagaggtcagaggcacctcctcaaaaacattaggcgtcggaaacctccacactcatctccaaatcaacaatctcttggctcttacctcgaggtaggacactttggatatgaagaagagattgatcagctgaagagggataaacagctcttgatggctgaggtagtgaagctgaggcaggagcaccaaaatactagatcagatctacaggccatggaagagaaattacaagataccgagcagaagcagcagcagatgatggcattcatggcacgcgtcatgcagaaccctgatttcatgcgtcagctgatctcccagcgggagatgaggaaggagctcgaggatgccatctcgaagaagagaaggcgccgcattgaccagggacatgaagctggtagcatgggcactggttctagcctggagcaagggccacagggagtgtttgaaccgcaggagccggtggaatcactcgccaacggtgtgccatctgatctggagagttcgtctgttgaggcgaagggattggaggttcgacagggtgtttcttcaggtggttctgagcatctgaatggcaggccaagcggagagttaaatgatgatttctgggaggaccttctgcacgaggggggacttggtgcagatgcaggcaatgctgttggtcaggatgatatgaacatggacatggacccagatgttagcctgcctcaactgaaacaacatggacccagacattag

SEQ ID NO: 106 - DNA, 723 bp, Zea mays
atgggtcgcggcaaggtggagctgaagcggatcgagaacaagatcagccggcaggtgacgttcgccaagcgcaggaacgggctgctcaagaaggcgtacgagctgtcgctgctgtgcgacgccgaggtcgcgctcatcatattctccggccgcggccgcctcttcgagttctccagctcctcatgcatgtacaaaacactcgagagataccgcagctccaactacagcacacaggaagtaaaagctccactggagagtgaaattaactaccaggactacttgaagttgaggaccagagttgattttctccagactacacaaagaaacatccttggcgaagatctgggcccactcagcatgaaggagctcgagcagctggagaaccagatagaggtatccctgaagcatatcaggtcaagaaagaatcagatgctactcgaccagctctttgatctcaaaagcaaggaacaagagttgcaggatctcaacaaagacctaaggaaaaagctgcaagaaacaagtccgcagaatgtgatccacgacgtctcctgggaggaaggcgggcacagtgggagtagtgttcttggtccgttccagggactccttcagcaccatggcaatgatccttccctgcagacacggtaccatcagcaggcctacatggaccagctgaacgaggacatggcggaccctgacgagcacggtcggtctggatggatatga

SEQ ID NO: 107 - DNA, 2211 bp, Zea mays
atggcggggatcgacctcaacgacaccgtggaggaggacgaggaggaggcggagcccggcaacgcctgctcccagcagagccggaccagctccgcggccacgttcccgccgccgccgccgaaccagccgaggccgagcgccgcggtgtgcctcgagctgtggcacgcctgcgccggccccgtcgcgccgctgccgaggaaagggagcgtcgtggtgtacctcccgcagggacacatcgagcacctcggcgacgccgcggccgccggcggaggcgcgccgccgcccgtcgccctgccgccccacgtcttctgccgcgtcgtcgacgtcactctccatgcggacgcgtccacggacgaggtgtacgcccagctcgccctcgtcgccgagaacgaggatgtcgcgaggcggctgcgcggacggtcggaggacggcagcgccgaggacggcgacgaaggggaaaccgtgaagcagcggttctcgcggatgccgcacatgttctgcaagacgctcacggcctccgacaccagcacgcacggcggcttctccgtgccacgccgcgccgccgaggactgcttcccgcctctggactacagccagcagcgaccgtcgcaggagcttgtggccaaggatttgcacggaaccgagtggaggttccgccacatttatcgagggcagccccgcagacaccttttaaccactggatggagtgcctttgtcaacaagaagaagcttgtctcaggggacgccgtactatttttgaggggtgataatggggagctaagacttggagtgcgccgtgcagctcagcttaaaaatggatctgcttttccagctctttataaccagtgcttaaatcttggttcactacctaatgttgcacatgctgtggccaccaaaagtgtgttccacatctactacaaccccagattaagccaatctgaattcattataccattttcgaagtttatcaagagcttcagtcaaccattttctgctggttcgaggttcaaagtgaaatatgagagtgatgatgcttctgaaagaagatgcacagggatcatagcaggaattggtgatgctgaccccatgtggcgtggttcgaaatggaaatgtttgatggttcgatgggatgacgatgtagattttcgtcaaccaaacaggatttctccttgggagattgagctgactagttcagtttcaggatctcacatgtctgcaccaaatgcaaagagactgaaaccatgtcttccccatgttaatccagactacctagttccaaatggaagcggtcgtcctgattttgcggaatctgcccaattccacaaggtcttgcaaggtcaagaattactgggttatagaactcatgacaatgctgctgttgcaacttctcagccatgcgaagcaacgaacatgcagtacattgatgaacgaagttgctccaacgatgcgagtaacattatcccgggggttccaagaattggtgtcagaacaccactcggaagccctaggttttcctaccgttgctcaggctttggggagtctccaagattccaaaaggtcttgcaaggtcaagaagtatttcatccctacagaggaactctggtcgatgcaagcttgagtaatagtggcttccatcagcaagatggttctcatgtgcctactcaggccagcaagtggcacgcacagctacatggatgtgcttttcgtggccaacaagcaccagctgttccatctcaatcctcatccccaccatctgtcctgatgtttcaacgaggtgatccaaagatgtccccatttgaatttgggcatttccacgtgaataagaaagaggatagacgcgcaatgtttgtccatgctggaggcatcggaggaactgagcaaacgacgatgctccaggctcatcatgtttctggaggaacgggaaacagagatgtgaccgttgagaaatctcatcccgctgttgccgctgcttcagacaacagggaagttagcaaaaacagttgcaaaatatttggcatatctttgaccgagaaggttccagcaatgaaagaaaagggctgtggtgacatcaacaccaactatccatcccccttcctgtctttgaagcaacaagtgccgaaatcgctgggcaacagctgtgccaccgttcatgagcagaggcctgttgttgctagggtgattgacgtttcaacagtggatatgatgatctga

SEQ ID NO: 108 - DNA, 1836 bp, Zea mays
atggtcatgaagatggagcacgaggacaatggtgccatcggaggaactgatggcacgtggacagaggacgaccgagctctcggcgctgctgtgcttggagcagatgcctttgcatatctaacaaaaggaggtggtgccatatccgagggccttgttgccacatctttgccgggtgacttgcagaacaaactccaggagcttgttgaatccgagagccccggtaccagttggaactatgctatcttctggcagctctcacgcacaaagtctggtgatctcgtccttggatggggggatggctgctgccgtgaaccccgcgatggagagctgggagctgctgcttctgcaggcagcgaagatagcaagcagaggatgcgcaaacgtgcgctgcagcggttgcacatcgcattcggagttgctgacgaggaggattattcccctggtattgatcaggtcacagatactgagatgttcttcctggcatctatgtactttgcgtttccccgtcacgctggtggccctggccaagcatttgcagcaggcatccccatctgggttcccaatagtgagcgcaaggttgtaccagccaactactgttaccgtgggttccttgcaaatgcggcaggatttaggactattgttttggtgccatttgagagtggcgtccttgaactgggctcaacgcagcacatagctgagagttctggtactgtccagacagtaaggtctgtatttgcaggaacaagtggtaataagtctgcagtgcagagacacgaggctgaaaggtcacccggtttggcgaagatctttgggaaggatttgaaccttggccggccttcagtcgggctggcggtcggtgtatctaattctaaggtggatgagaggacatgggagcagaggagtgctgttggtgggacctcattgctaccgagtgtccagaaaggtttgcagaatttcagttggagtcaggctcgtgggctgaattcccatcagcagaagtttggcaacggtgtgttgattgtgagcaataatgagggtgcacaccgcaacaacggagcagtggacagccctagcgcagcgcagtttcagcttcaaaaggcgcctcagcttcagaaactgtcggttgttcagaaaacgcctcagctagtgaaccagcagccaatgcaggcacaggtacctaggcaaattgacttcagcgccgggagcagttccaagcctggtgtgttggttacaagggcaggtgtcctggatggtgagagtgcagaggtggatggcttgtgcaaagaggaagggccaccacctgttatggaggaccgacggccaaggaagaggggaagaaaaccagcaaatgggagggaagaaccacttaaccacgtcgaggcggagcgccagaggagggagaagctcaaccagcggttctatgcgcttagagctgttgtgccaaacatatcgaaaatggacaaggcgtccctgctgggcgatgcgataacgtacatcactgacctccagaagaagctcaaagagatggagacggagagggaaaggctgttggagtcgggtatggtggacccaagggagcgggcgcctaggccagaggtggacatccaggtggtgcaggacgaggttcttgttcgtgtgatgtctccaatggagaaccatccagtcaagaaggtcttccaagcgttcgaagaggcagaggtccgtgtaggcgagtcaaaggtgacgagcaataacaacgggacggcggtgcattctttcatcatcaagtgtcctggcactgagcagcaaacgagggagaaggtgatagcggcaatgtctcgcgcgatgagcagttga

SEQ ID NO: 109 - DNA, 942 bp, Zea mays
atgcggatgagctgcaatggctgccgcgtcctgcgcaagggctgcggcgacgcctgcaccatccgcccctgcctgcagtggatcgaggcccccgaggcgcaggccaacgccaccgtcttcctcgcaaagttctacggccgggcgggcctgctcaacctgctcgccgccgcgcccgacgacggcgtccgccccgcggtcttccgctccctgctctacgaggcgtgcggccgcatcgtcaacccggtctacggctccgtcggcctgctctggtcgcgccagtggcacaggtgcgccgacgccgtcgaggccgtgctcaggggggaccccgtcgtgcaggtcgacgccgggtccgacgccgccgctgccccgccgctgctcgccggcgccaggccgccgccgccggccgccttcgacatccgccacgtccccagggatcccgacgccaccgccgccgacctcctccgcgccggccgcaagaggttcaagcgcgcgggttcgtcttccaacgcctccaaggcgaagcccctgcccctcgagctcgagggcaaggccggcaacaacgaacgcgcgtcgcccagccctcccccgacgcaacaacgagaggcggaggagctgcagccggtgccgatggtcgtcgagccagaacacggcgaggagtccgccggcagccacgaccaccacctgcagctgcaggggtggtcggaggaggacaccgacgtggaggcggcctcacacgtgagccaagccgaggctgagccgccagccagcagccagagccaggtgctggtagcggatcaggaggaagaggaggttgggctcgagctcacgcttgggttcgagcctgtcgtcaggcagcagccgaggtcgtcgcgctgcgacaagagcggcttgagcgcggcatcgagcctcatcggcctgcggctgcagctgccggccgcctaa

SEQ ID NO: 110 - DNA, 1548 bp, Zea mays
atgggcatccaagggaacaaggcggcgacgcacgagcacgacttcctctcgctgtacgccgccgccgccgccaaggacgctcctctcctgctacacgactccaaggcgccgcctccttctcaaggtaatttcctcttgaagacgcacgacttcctgcagccgttggatcagaagccgggagcgccgccggagccgtcgccgctgcccgcttccgccgcggagagcaggcaccagccgcagcagcaggtcgtcgtcgcgaaccagcacgcgctgcccctgcccggcggcgtcggcaccttcagcatcagccccgcgcccgtgtccgtcgcgctgccggcggccgtcgtcaagtcggagccgccgttcgtgctctggggccagcctgccgcgacgctccatccgggcgcgcgagcagggcaccagcagcagtgggcgctccccttcgccggcgccgggcaggtcaggctgccgccgcagcaggcgcctccggatagaaagggccggggcggcgccggtggcggcgtcatggagtctggctccagatccagcggcggggcggggttcgacgacgacgacggcctcacgacgcgccgcgaggtctcctcttcgctccaagatttgacagtaagggtggaccggaagggtgggagctgcagcgatggtggtacggatcagcggccaaacacaccgcggtcaaaacactcggccacagagcagcgcagacgcagcaagatcaatgataggtttcagatacttagggagctgttgccacacagtgatcaaaagagagacaaagcaacatttctcttggaggttattgaatatatacggtttttgcaagagaaggtgcaaaaatatgaggcaacatttccagaatggaaccaagaaaatgcaaagatgcttccatggtcaaatatgtattttcgatcattctggaaaaatgcacagagtaaaggccaaatctcaggagattccccgcctgacccttcacatttcatgagaaatggatcctcccctggatctaatttcactgggaaacttgatgataatcacaacatagtgacatctgcagctgcatcaggggcacaggatcaggtagaaaccgaccacatggctagcggatgctacagatcagcagaaactacggcgaattttacaaataatgctatgtctcagtcccaacctcaatggactggtccgtcccctgtggatgactctgcagtgaacagtgagacgcttaacaaccagcagttggtgattgatgaaggaacaatcagagtgtccagtaactattcccaagagttgcttaactcgttgactcatgcccttcaaagctcaggtgtagatttgtcccaagccaacatctctgtgcagatcaacatgggaaagcgtgccgccaagagacccgctgctggtgtatccagcaactccaaggaaccagctgatccggcatctagcaacgaattagggcatcagttgacgctgtcgggtgccggtgccgactgcctctctcacgcaacaaagcggcataaacggagcaacagctga

SEQ ID NO: 111 - DNA, 780 bp, Zea mays
atggctgagcagcagccgccccattctccttacccggcggtgcaagtgcaacgaccgggaccgccagcaggccacagccgccaggctggttcggcttcagcctcgcctcattctccttctccagtggtgcagggcgactactacgggacggcggcggcggccgcgacgagctcgggggagccgtcgccgcggtcgtccgggaagcacgcattctaccgcggcatacggtgcaggagcggcaagtgggtgtcggagatccgggagccccgcaaggcgcgccgcatatggctcggcacgtacccgacgcccgagatggccgcggccgcctacgacgtggcggcgcgcgcgctgcgcggcgcagacgccgtgctcaacttccccggcgcgatcgcctcgcgcgcggccccggcgtccgcgtcccccgctgacatacgcgccgcggccgccgccgccgcgcaggcgcagctcgagtactcgcagtcgcagggtgccgccagtaatcctcttgccgccgccgctgcacagggccggcatcagcagcagcaccacggggcgagcagtacggcgacagctgacgcggcgggctacaccgcgccgcagcaggagatgggcactgacgagttcatggacgaagaggccatcttcgagatgccgcagctcctgcggaacatggcggccgggatgatgatgagcccgccgaggctcagccccgacacctccgacgagtcgcccgacccgtccgaggccggggagagcctctggagctaccatgacccgtag

SEQ ID NO: 112 - DNA, 1521 bp, Zea mays
atgggcatccaagggaacaaggcggcgacgcacgagcacgacttcctctcgttgtacgccgccgccgccgcggccgccgccgccaaggacgctcctctcctgctccacgactccaagacgccgcctccttctcaaggtaattttctcttgaagacgcacgacttcctgcagccgttcgatcagaagccaggagcgccgccggagccgtcgccgctgcccgctccagccgcggagatcaggcaccggcagcaggtggcggtcgccaagcagcgcgcgctgccccttcccctgcccggcggcgtcggcaccttcagcatcagccccgcgcccgtgtcggtcgcgctgccgtcggccgtcgtcaagtcggagccgccgccgttcgtgctctggggccaacctgcagcgacgctgcagccgggcgcgcgagggcaccagcagcagtgggcgctccccttcgccggctccttgcaggtcagtccgccgccgcagcaggcgcaaccggataggaagggccgcggcggaggcggggtcatggattcaggctccagatccagcggcggagccgggttcgacgacgaagacggcctcaccacgcgccgcgaggtctcctcctcgctccaagatttggcagtaagggtggattggaagggtgggagctgcagcgatggcggtacaaatcaggggccaaacacaccacggtcaaaacactcggccacagagcagcgcagacgcagcaagatcaatgataggtttcagatacttagggagctgttgccacacaatgatcaaaagagagacaaagcaacatttctcttggaggttattgaatatatacgttttttgcaagagaaagcgcaaaaatacgaggcaacattcccagaatggaaccaagaaaatccaacgatgcttccgtggagtaaaggccaaatcccaggagattccccgcctgacccttcacatttcgtgagaaatggatcctcccctggatctaatttcactgggaaactcgatgataatcacacatctgcagctgcatcaggggcactggaccaggcagaaactaatcacgtggctagcggctgctacagatcatcagaaactccggcgaatattacaaataatgctatatctcagtcccaacctcaatggacaggtccgtcccctgtggatgactctgcagtgaaaagtgaaatgcttaacagccaggagttggcaatagatgaaggaatgatcagtgtgtccagtacctattcccaagagttacttatctcgttgtctcacgcccttcagagctcaggtgtggatctgtcccaaaccagcatctctgtgcagatcaacctgggaaagcgtgctggcaagagatctgcatctgctggtggtgtatcctccaactccaaggaaccaccagccgatccagcatctagtaacgaactaggcggccatcacgtgacaacgttgggagctagcgctgacggtctcctcccccacgcgacgaaacggcataaacgggacaacagctga

SEQ ID NO: 113 - DNA, 639 bp, Zea mays
atgtctgaccgcggcgggccggcctcgccgcggtcggggaagcaccccttctaccgcggcatccggagccgcagcggcaagtgggtgtcggagatccgggagccgaggaagacgcgccgcatctggctcggcacgttcccgacggccgagatggccgccgtggcgtacgacgtggccgcgcgcgcgctgcgcgggcccgacgcggcgctcaacctcccgcacctggccgcgtcccgccccgcgccggcgtccacctccgcggacgacatccgcgccgcggccgcggaggccgccgcgtcgctgcagcagcccgatcaccagccgccggcccatggcagcgctgctgggcgcggcattgctgccgccgcggctggtgcaacgcagcagcagcaccagcaccagcagcaggccggcgggagcagcggcgcggcacagcatgaaggcggcggcggcggcgcggggaacccctacttcctggacgaggaggcgctgttcgagacgccgcagtacctgcgcaacatggccgcggggatgatgatgagccccccgaggttcggccgcaactcgtcggacgactcgccggaccacccgtcgtcgtcggatgccggcgacagcctctggaactaccgggacccgtag

SEQ ID NO: 114 - DNA, 1290 bp, Zea mays
atgcagctcttccaaggagagaagccggcccacgatttcctctcgctccacaccggaggaggcccgtcgtcgcccgtgcagcagcagcatcccgcccaaggatacgaatcgggggcgcacagttcgctgaagcccatgaaactggacaggcggcggcgcggcggcggcggcggcggagcgatcgacatggcaccgtcgtcgggcttggagtcggactccgaggagcacgtcttgccgggcggcgtcgggacgttcagcatcaggcaggtggcatctgcgactcgatcgaggggagaagccgccggccatggcgtcgtcagcggcgcctttccacctgccgttcatgtgtccagaacggaggagggcccgccgcatggagcagaatcgggagccagggctcacagcggcccgctcgcgatgtggcaagattctggcgtcgaccaaagatccagaggcgcgagaggaggggaggggagaagcagcggcagcagcgccgatcaggggcccagcacaccgagatccaagcattccgctaccgagcagcggagacggacaaagataaacgacaggttggaaatacttcgggaactcctgccgcacggtgaccagaagagggacaaggcatctttccttcttgaggttattgaatacataaggttcttgcaagagaaggtccaaaagtacgagtcagcccaaccagaaaagaatcacgaggactcctccatgccatgggcaaaagtttactacagatcatgctggaaaaacacagagaatatcatccaaggaggaggattagcaccttccacgaaagatgagaacaaagaacagtatgattccaagcaaactacggtggcatcgtctgctctctttgacacacaaagtgctagagaaactagtgcaaacgatatttcctcccaaaaggcaacaagcaaagcaaaatgcagggcagacaacagcgtacctggcaaacagccaccatggttgagcatgtcaacctctgatgcagacaacaaaacactgagcaagaacgagaaacaaactctccaagaggatactcaaagtctttctgatgcttactctcaagggcttctaaatagattgacacaagctctaaaaaggtcgggagtagacccatctcaagctagtatatctgtagagatcagtatggacagaagagcaacagaacctaataatatacatgacaatttgaaggatcatgaatgtgaagatattatacatgtgaccaagaagcttcggggcgagagaagcaagatctccagctcaaactga

SEQ ID NO: 115 - DNA, 837 bp, Zea mays
atggctgagaagcagccgccggcaccccattctccttccccggcggtgcaggtgcaaccggccgggccggcagccggcggccacagccaccaccaggcggcttctgcttcggcttcgggcccagcctcgcctcattccccttctccggtggtgcagcagggcgacgggacgtcgtcggcgcgggcagctgccatcacggctccgccgatggcgacgacgaccgcgacgagctcgggggagccgtcgccgcggtcgtccgggaagcacgcattctaccgaggcatacggtgccggagcggcaagtgggtgtcggagatccgggagccccgcaaggcgcggcgcatatggctcggcacgtacccgatggcggagatggccgcggccgcctacgacgtggcggcccgcgcgctccgcggcgccgacgccgtgctcaacttccccggcgcgatcgcctcgcgcgcggccccagcgtccgcgtcccccgaggacatacgcgccgcggcggccgcggccgcggccgccgcgcagctcgagtactcgcatcagggtcgtaccgccaatcctcctcctcctcctgcttctcctccttctcctgctgctgctgctgcacaggactggcatcaacagcacgacgcggcggcgagctacacgccgcagcaggaggccggcactgacgagttcatggacgaagaggccatcttcgagatgccgcagctcctgcggaacatggcggcggggatgatgatgagcccgccgaggctcagccccgacacctccgacgagtcgcccgacccgtccgaggccggggagagcctctggagctaccgtgacccgtag

SEQ ID NO: 116 - DNA, 1470 bp, Zea mays
atggacgggttcgtggaccccttcgtcccggaacaggcatggccgcaggacgccatgttcatcggctcatcctggccatgcgccggcgccggcgccacttccctcgccgaccctgcagggacgtacgcgtacctgggagctcaggctgcaccaggccaaggcgcaggctttcacctccaagacggctcctccacggcgctcgtgccgcccttggagctgcaccagcagttcctgagcgcgcacctgccgggcgacgacgtgaccgtgacccaggaggagggcctcggcttcgaggtgaacagcgcgctggtggccggcatgctgggcccggtcctgagcgcgccctgcgcggtatcgctcgccgacagcgcgccggtggtgtgcagctcctccaacgacagcagcggcgggagcgagcagtccggcctgccgccgccgccgcggttcctagtcctgggagagcagcccgcgtcgtggccttccgcgttcccgcggatctcgtcgctggccggggaagagacttcgcggagcttcggtttcggcgcggttagcgacaacgatctcgtccgtggatcctcctgtgtcgcggacgtgaacaagtatccacagataggcaatgcgcggctacatgtagaggatgacgttgagttcaacactggaaagatgctgtcgttcgctcctggccttgactttggcgatctgcagctcagccaaaaggaactcagcggtctgcgtcacctgaactctgggcagcagctctcgtcgtttgatgcaacgcgtaatcctgaacagtcgtctaacgaggccagcggcggcggaactgggttgaatgcgccgccgttcatggttccggccaatggggctgctgggaatggagctcctaagccgcgcgtcagggctcgccggggccaggcaactgatccacacagcattgcggagaggctccgaagggagaagatctctgacaggatgaagaatctacaggagctcgttccgaactccaacaggactgacaaggcatccatgcttgacgagatcatcgaatacgtcaaatttctccagctgcaagtgaaggttctcagcatgagcaggctgggcgcgacggaagccgtcgtcccgctccttacacagtctcagaccgagaactccggtggtggtcttctgctgtcccctaggtcaggctcaggcaggcagcagcaggcacgcggaggcagcctgccgccgccgtcgtccgaggtccgggacggcgcggcgttcgagcaggaggtggcccagctgatggagagcgacatgacgacggcgatgcagtacctgcagagcaagggcctgtgcctcatgcccgtcgcgctggcgtcggcgatatcgggccagaagggggcgtcctccgcggcggtccagccggagaatgggggcgccaaggaaatgctgcgcgcggtgaagcccctagcaagtccaatccatgggagatga

SEQ ID NO: 117 - DNA, 729 bp, Zea mays
atgccggaccgggcggaatcaagcccggcgtcatcgagggaggcttcatcctcaccgccgctgtcagcaactgagacggctgccaggcgcagcgcatcgggatgcgggaagcgagcccgtgcccgtgacggcgagaagcacccgtcgtaccgcggcgttcggatgcgggcgtgggggaagtgggtgtcggagatccgggagccgcgcaagaagtcgcgcatctggctgggcacgttcccgacccccgagatggcagcgcgcgcgcacgacgccgcggcgctagtggtcaagggccctgccgccgtcctgaacttcccggagatggccgcggcgctccctcgcccggccaccgccgcgccccgtgacgtccaggctgccgcagtccgcgccgctgccatggagccatctatgatgcttggccccactgccccattgcccagatcggcgcttgccccggtgaaggggcaggtgcatgacgacgagctcgaggcgatcgtcgagctcccgccgctcgacgaggacttctccgagctgctcgtcccgctcggcaccgcgtctttctcgttccacgacgctacgcaagcgtcttggcgcgacccggagtggatcgaccacgacgctggctatatggcggcggcgcgcgatgccgacgagctgttcggattcgggccggacggcgatcacggatgggcgcagccgtttggtagtaccttcctatggaacatgtaa

SEQ ID NO: 118 - DNA, 1450 bp, Zea mays
cttggcgccgtgacggtgacttttctttgccgagtgccaaatggcactcggcaaagtctttgccgagtgcccgacaaaaagtactcggcaaagaagctgttgccgatgtacagttcgccgagcgttctttgccgagtgttacactcggcaaaggctttgccgagtgtaaaatagcctttgccgtgtgtttagaacacacggcaaagaagctgattccggtagtgactacaaagtgacaacctttttgtgtgctaactacaaatgaaatggcaagcaacaggggctcaaataagtccagcgatacattgatacatacgtggtagcctatagttgtgacctcgatttttttgtggacacttcatgtaataataatgccttcacggttttttttgtttgttgcatggcaatttgtttatgcatctcacaaaaaaaaaaccctcatgaaatctcggtttcttggtagtgtcttatggtgtgaccgctgtacaaagtgccaattagaatcacattttttgacataattacggcttattacatagttatacatgttccacatatgtaactttactaaaaactgcaataacctcttagtcaagagaagccatgctcatctcatcatttttaaggaaaaaggcacaatatatatagatcacactctgcacttttatatttaattcaaatattattttcaagaaaccattttcaactgctattagggtatggactagccttaacgtgatccaatagcatttctgctgtaaagaaaataacgtgatccaatagcatttccgcagacatgtcatatctgactattgacaatgtaacgcaatgtcagaaggtttgaagaacaaattaataggatcatcagtttacctatatacgcagaacagaatgtattgggattccctttttccacgatgcccacgcacgtccacgtgcacacaccactcctgtagtgaatcccgagttcaaaacatgagagaatctgtagcctttgaagctttgagcctacagcaaaggaggacggcaacgtgaacagcaagcagttcacgtttgccaagtgcctataaatagtagccaccctatagcagcaacgagatcaaaacagcagagcttgcaagagctaaaaacgacttcagtccagccatccaacaagaagatcagtctacacataaaaccagagatgtctgggtccaggagctcttcgtctcacaacgttaccattgattccgagtggagcaaaaaggagaacaagctgttcgaggaggccctagcctgctacggcgcgggcacacccgaccgctggcacaaggtggcccgtgccatgggtggcatcaagacagccgacgaggttcgccgccatcacgagatccttaatgaggatgtcacgctcatcgaatccggcagagttccattccccaactacaacacgcagggagcttggaactaa

SEQ ID NO: 119 - DNA, 2083 bp, Zea mays
gtatatagctttggcatggaccatagagaacatatgcaattccctcttccaaggccctggcaacaggtgaaatgtattcttcagtccaaaagagacttaacaagccttgctttggtagtcggcacatattcttccaatctctcatcatgcaggaggcaaggatacaacctagataaggtcatttcatgtgtacaaaagggcaggcttcggatttcctttcattcaccactcaaaagttaaaccccttcaattttaatctaccttggtgaagaagacagaagacaacactccaatcttgttcagtcttgggatatgtgatgaatcgacctgccacttaaggcgaagcaaacgaacatgttagtcactaagggattcagcagtcactacttacagagcaaggcaaccttgtaactttataggtctctgcaagtatacgaaacagctgctggatacaatgacaatacatttaatttgattacttgcactgatcttaccctcactcctgtctgtctgcctattcataatgcacactgttcttgccacctggaaagtgtatgtttgatcagaacttgagccatatataggagttattaaatatatcactgataccgagaatgtttcatcacctctatagagattaatatatcgctgatacagataatgtttacatcactgataccatatccagcatcatgcaccatcagccatctcaattctcaacacacacacaaaaaaaatcttgagctatcaaacacacacacacacacacacacaaaagtcataaagaggttttaaaacatagagattctactcttctaatttagatcacactgtctccatgtcccttggccctgaaaccagccaaccttattcttctcagccacctttaacccacaatcgtgattctatgcaacttacagctcagagctcacacacacacaagcgcagcaggcaacctcagggcctataaatagcagaccttgtgacaagagataccaaaccataagagcttctgaagagcgaaatacttcagtctagacactagatacagtaagccttagcgcaccaacagaggatacttcaaatatgtctgcctcgcggagctcctctcccaactccatgtcacagtggagccagaaagagaacaagatgtttgaagaggcactcgcctactatggcgagggcacacccaaccggtgggacaaggtgtccagcgccatgggaggcatcaagtctgccgaggaggtgcgctgccactatgaaaatcttgattacgacgtcaagatgattgagtcaggcaatgtgccgtaccccaagtacaagacacagggattctggacccgaggtaaagtccatggcacttcgaaagcaaactggaaacttataacataagggcttttttctgtactgataagcttttggttaactatatggatgcttgttggtgatagtcataagaagcaggcctcgggctaagagtaattcagtcaccataccatatttttttatgaataggtcaacatgcatcgctacgatggctcaagaattcagacactcgagcgtctgagtgttttatgttctttagctgttccattccatacatgggtgaccacatcaacattgtataggccaaattgcagacatccttgcctttggatctaattactcggtgtttgtccactaatgcccactaatagtctgggatccaaacctagtactatgacaaatatctcctacctccaatagaaaagtttggatcttgcactctaatccctcatgcatccagcttgcacccgacatgcagttctcatattactctagaagtcacaacttatgccaaaagggcatctccatggcctttttagcgtgtgactaggcaagctttgggtagttctttgttgtcctttcttttgttttttttttcaagtgggtgatttctggtagggaggtctttactaaaaagctatagtagcagcttcaaccgaaatcagtacaagcacatatcacatagtacaaattagaataaatgcttacaattcagagaagcttacggtgtgcatattgacttttgctttcaggttaa

SEQ ID NO: 120 - DNA, 1392 bp, Zea mays
aatatccaacttgttaagattcataaaaggtaaacctcaaattcatcctacattttctcaaataatagatataaacttcggtatggattcggaaacaaattcggtaattttttcaactttttgtgttgtagagaacaaataatacataaaacaacttatataatattttattcatatttgtactaatgtgcttgataacataagaaaagatcaacatcaaattttatacatatctattttaaaatattaaatttgttctaacagttcggattaccactttcatccctaataatagtgttgtttagatctcagaagggtagaattctagacttccatgttctcttggggcctgtgtccaacaaagttctattctatctgccgatacattgctgaataaaaaatccagtatgtcacgataacactaaaaggggctgataattgagatggattggcccaatttattcgttgatcagagaatgctatatctattttttttttcatatctttattctctgtccattagtttttgtaagtgctttgaataagtaaccctaccctttctggtccaataaaagattctctttctctaattaagggaaggccacatataggcatatatatgttcaaatgtctgttaacttctaccgagtatgatatcatactagttagaaggttctgatcaatatgaaagaaatagaactgaaggtagtagtgaagactgacccacttcttatggactgcgcatgcaagagaatctttttatgaagattggacgcgtaggaaaagaaataaaaagttcgccatcttccccagcaaagctgaggttctggttactcctctcccaacaacttgtaacacattggggaattaatggaggctggagcaatgacacctcttgctcttactcatatggcttcctccgtcctatacagaattgccaacttgttctgtaaccccacatctacttggtattattcgatgctagctccctctatataaagagcactcgctccttgatccaaacagacacaggcagcagccattgcttgccctgcatctctcctagctaggtgtcttctcttgctgagtgaagataaaacaatgggttcgtcctggaccgagagtcaaaacaatctcttcgagcgtgcgctggcagtatatgacaaggacacaccagaccgctggcacaacgttgcgcgggcagtcggctgcggcaagacagccgaggacgtgaagaggcactacaagtacctgaagacggacgtgaagcacatcgaaaccgaagaaggcggccgaggatcccagtccagcagccctgctggtgctggtgctggtggcagtggaagcagcagcagcagttcttggggcagggacaacggtgacaagaggtag

SEQ ID NO: 121 - DNA, 4472 bp, Zea mays
gtccatgtcgacctgacctttggagctaccgtctaatccttctttccagttcttctgatcatgtcaaagatttgtgaacggcaccggcacgtgttgttaaaaagagggcagaaggcgttagattttgttttgtgttttagcacaaccacttgagatggagacgacggtttgttctaagatatttttttaggttttggtttaactttgagggcaacggatgttttatttgaagcttttataatctatcccggagaaactattcagaagacgacaaaaacatgtttataggtagttagagcaactctagatagaaaataaggttagatgagaagtagtttaatttaggaagtttatttagggagccgttgaatagaagttttagcttaattacctaaattattgattgagagagtgttttaagaactacaggagttgctctaatcggttaggttattcccaatggttatgttatggtggtttcatacacattgaatagtgtatggcatgtaaagaacttgaaaccatgtgaagcctacattaaaaactatatgttccatcttcatatattttagttgttattggtcatttagttgtaccgtttaattgacgaagtgaaatttgaattttgagacatttgttttattgagaatagccgcgtgacactttgtcggtgatttctagaatcaaatcctcaacgtgtcattgattaattagcatggaaaagtgtgtccaaaaaggacaaacaaaaacccacgtttgccaattaaggccctgtttcaatcccgtgagataaactttagcagcttttttttagccacttttagccatttgtaatctaaacatgagagctaatggtgataattgaaactaaactttagcacttcaattcatatagctaaagtttagccggaagctaaagtttatcccgtgagattgaaacggggcctaaaactggcgtgcgcctagagagaggcgtgaaagccgtagaccgtagtacgtgttttatctacagccaccgtccacacccccatttttttatctccgcttccactgttccaccaaaccaagccgagaaatttctcctaaatttcagatcaaatcctcctcctcctccccctctccctctccgaggattctgcccagcagcgcggcgatccgcctcgatccggaatggagcgcgtcttctccatggaggagatccccaacccctactgggccccgccgcaccctcaaccggcggccggcggcgctgttgctgcaccaggtggagtaggaggagcgggggacgcggcgggcgcgatgaaccggtgcccatctgagtggtacttccagaagttcctcgaggaggccgtgctcgacagtccgggtcccgtcgccggcgtgggtagaagcagcggacaagctggagttgaggcggcggagagcaagccgctgggcgccgcggcgccggcgtccgtctcgagctcggtcgttgaccccgtcgagtacaacgcgatgctcaagcagaagctggagaaggacctcgctgccatcgctatgtggagggtacggccacttgcctttagctgcagctcacctgcaatactgtttgcttcgaatagtcagagctcgtagtagcttacttgtgttcttatgtgaccggtgtatgatgtacatgtactgtactgtactatactgctccgcgtagttttcttagagatttatagtggactggaggataagaaacagcgagcagtccagcacagtatctcgtattcctagccctttacaatgagatggcggtgcaagcgatcatgtgcttttaggactagcgaaatgtggaattcgtggagaacttgtgcatttatggcattaggttattgcagagatcctacatttttgttgtgagctgatgattactgtcatttcatgtgcgggtggtcaaattcaactgctgttggctcataggtgattgtacactatttgagtatgtgaatagtcagcttcatttgtctcctatccatttttgttgtttctgtgataaggcttgtttcgtactgtatatactattgggaattatatgagcctggcttatcagaatattatagctactggatatgtttatcagaactttatggttcaagcatctgattatttttcctcaacgtctgtagtcgagtgatttcccattttgtgtgcctatcatcaagtactacagtaatatgagagggagaccaatattcatggtctcattttggtcatagcactctttttgtacttgtgtttatatctaatatttctgataccattttatccacaggcttctggtgcagcacctccagatctttctgcgactgctgcttccttgccaagtgtcggtgctccgcatgcagctcctcttaaacccgtcggaggtgatcacccaatcatcattttgccgcgtcttcaaatttattatgaaacttggctcaaatgtgtgaatgaccttatgtctcttgtctcagtgctctatactcatgtaataggtattagatcttcggttcctctctgtccttgtaatcatcaggttgcttgcaaggaaccatttcgaaaatgcaggagagctgtgtttctctcttgcgtttctttgcattaagaagaaaagcagcgaaaatccttacaaacatacacaacacaccaagcagatccatctcgcggctgacttgtaaatcatggggaacttgatattctgttgagtttttaaaataaaacaacttgtgattgtgaagcttttaactatgatctgacttttatcttgtgcatgtatcaggtactgaaagtctagttcaaaacatgctagctggtgctccagtaggggggtcaggtccacatgtagtacaaattgctgatatccctgttaagcaaaccactagctcttcctcacgagagcagtcagatgatgatgacatggaaggcgatgctgagacaaatggaaatggaaaccctgttcaacaaagacaacagagaaggtgagctttctttttgcctgtttgtgaaatgtatgtgcatcattactttatcgctgacattgtatatttgtatgccatgataattataatttgtaatgccattcttttcttatatgctactccgtataatattatttattagtggaccaatcctcaagtagagtgatctgcttgttttttaggttggcaatatataaaacacatatatcctaaatgttcccatgaagcaagtataaaacacatatataaattgttatggtcgctagatcgatgagggattggagaggtgtattgatgggcaggaacgccggtcgggggcctgcgcccacggccaagcaagaggagggtttctcccttctaattcttgcctgctttatttctcatccattgattacataaataggccggttggctgcccctatctagctagagatacttatctcctaaaaactctcaacaaactactaactgataaccttcctagataatctcaactaatctcctaaataatctcaactaatcttctaatcttatctctaactatccttatctaatcccccttgagggcccatggctgctgctaccgcatacatcgagtattatttagttttcttgactgttcccaggaagcaatccaaccgggaatcagccaggcgttcgagaagcagaaaggcggctcacttgaatgaactggaggcacaggtctgatgggttatgctataacattgtcatgtgttgacagatcctaaatgttcttgggctcttgtctaacgagtcaagagttgtggatgccttgttacaggtagcacaattaagagtcgaaaactcttcgctgctaaggcggcttgctgatgttaaccagaagttcaatgaagctgctgttgacaatagggtgctaaaggcagacgtcgaaaccttaagagcaaaggtacgctgctttgtcttgtgctgtttgagccctgcatctgttgaactgggcattttgtgttgttccagtcgctagcgctaggtgaatcacaccctgaattttggagataatccatggctatctcatagaacaggccttacctgtatggttggatgttcttggccattctgatgggatgttgggaatactttcaggtgaagatggcagaggactcggtgaagcgggtaacaggcatgaacgcattgtaccctgccgtgtcggatatgtcttccctcagcatgccattcaatggctccccttctgactccgcctctgatagcaccgtcccggtacaagatgacctgaacagttacttcgccaacccaagcgaaatcggatgcaacaacggctacatgccagatatagcctcctcggttcaacaggacgacaattttgtcaacgggtatcaggctgctggcaagatgggcagaacagactcgctgcagcgggtggcaagcctggagcacctccagaaaagaatgtgcggaggcccggcttcatccggctcgacctcctag

SEQ ID NO: 122 - DNA, 2701 bp, Zea mays
gacactagcagaatattgtgtcttagccattggtgtgccaactttagatgatcaagacaagatacttcttccccctagctagagtgaggtatgcacccgtgtttgttttgggaaagccactttgcatgctcgagttttgccaaattaaaaaagaaaacaacagtgtcgaagaagttaaccttttcgccagattcccaggcaaaagatctccatatggagccatggaacgaactatccggagcgtacggcctttgtgtatcatcatcgacttggacttgcatcgtgcacgaggacagccagagaaaacaaatggcaggaggcaggaccacagcgtgcttgggagcgctgccaacaaaaccaaacgcatccatctgaccccaccccccgcgcgcgcagcctccagacgtcccgaaacgccaatccgccaccgaaaccgatgggccaatcctccagatgtcccccgtgagaccagggacatggagatggaagaatcaccacggacgattcacgtctaaaaaaaggcgttcgtcatccattccaggccaggcaggatctcacctgggcacgcaagctgtcaaggcgtcgatcacgcatgtaaaaacttgcacggaacgtaagctaaagcaaaaaaacggaagggaccccgctgcagttctcggagagacgcgaggggtgcaggcgcaaaactacgcgtgtggtgtgagaagcggtaactcgaggccgcgccgatggagggatcccacgattcaccgtggagtgttgagagagacagagacgtccggctccggccgcgaccgcgagcttatcgcgctggatgcgacgtgaggaatcggcaacgcagcgcgcgcccaccgcaccccaggcgccgcgtggtttgggggcgtggtctctctctctctctctcctcccatcctgcggtccagctcgcagattccattcgccccgctcgccgccaccacccgtctatacatatgccagggcgggcgcacctccggaatccagatcccctcacagtcatcctccacccaccccacccaccgcctccgcctctctctctttcgtttgttcgtctcggcttccggtcgccgattcttctctgcgcaaaagattcctggtggtggtgcccgtaccttgctccacgcctcgctcgcgtcgcgtgcatggggctggacgtcggcggcatcgggatgggcctggatctgggtctggacctcgggctgttcgccgcgcggagcgccggagggatggcggccgcggccaagggtgcgccggcggagatcgagtcctgcatcaggagcctcgaggaggagcgccggaagatcgaggtgttcaggcgcgagctcccgctctgcgtgcgtctcctcgccgatggtgagaagtggtctcctgctgtcctttcatgtacttcttcctatcctacgtatatacgcgcgcgcgcgcgttgttgtggtctctcttctcggcccctggttcgctgacgcggtggtggtgcgtgcgtcgcggcctgcagtgatcgacgaattgaaggatgaggccgccaagagaggcggagacgcggaggccaaggccgacgacggcgataagcggaaatggatgagcaccgctcagctgtggctcgacagcgacgccaaatccgacgaggtagagcaggcaactctagtacgccatgctgcttgttttcatcagattgctctattgttttcctttttgatccatgggtctttcatgtttagggtcattcttaccaaataaaatcaaactgtaacacggattattttatctctacttacagtctgacaaagagcaactgagtgaaatcacttcgccggagcccaagttgctcggtggcgcacccatgcccataagggccgttgcggcggtgccacccctgccgcctccattcttcaggagagaagacagctctgccggcagtggtctgtcgctggtaccacccgcagctaagccgccgattcctcccatgtctgccagcgacaacgcgagcggcagattctgtgccactatgccaccgtctggctctggggccaacttgcactctcaggctcagcagcaagccaggaaggcgaggcggtgctggtcgccggagcttcaccggctgtttgttgccgccttgcatcaactcggcggccctcaaggtacatatacacgacaccgcggatcgtctgtaagaagtttactactagttgcttgctagaggagatgtgttaacgaatttcaccgttggttgcagttgctactccgaagcagatcagggaggtgatgaaggtggacgggcttacaaacgatgaagtgaaaagccatctccaggtgagcaatgatccgttttgtccgggcattattatttccttctagtagcgccgcgccggtgcctatttcagacgaaggcgatgatatagcatcttgttttggaaactgattcgatcggcgtgtcgtgttcgtatttcagaagtaccggctgcacaacagaagatcccccggcgtcgtggctccggtgagccagtcggtcatgctggcgggcggcctctgggctcctcctcatcaggagcaaagcagctcgcagtccgggtctccccagggcccgcttcagttctctggatccggtgtagcggccaccgtcggcggcgatagcagcagcagcgacgaggacgacaagtccgaaggctacagccggaaatacgtgtaa

SEQ ID NO: 123 - DNA, 2206 bp, Zea mays
tctcgagttaatccctgaggttttactatcaaatcccgctagaaatccggaaccctaactaattctgcgcacgcgcggaccgtctgcgtcaccaacgtggaccgtccggccccaggggcgtaccgtccgtctgacaattttcgtgttcaacaattgtttataaagtaaaatttaaaatagagaatgagataaagatcggttcgagatagcctaagcatctccaagggattctttatttttggctctctatttgactatctatttaccattccataaagattggctagctccaacaaggagctctaaagggtcctacaccctaaatttagaggataaagacatcctctactccctccagcagcgtcctctaaacggttctctaaatttagaggacgttgctggatcctctatatatagagtttctctaaacggttctctatccatttaaatactttaaacaaccggtttagtaaaactaaaatatgtacaatacattcgagagtatgacaaatacgtatgtacaaaaaattaaaaataaaaaatgtctttaatatatgtatttgcatatagaggacgtgatttagaggacgttgttggagaggaaggagatatagaggatgaaatcttttagagaagactgtaaaggacggatatagaggatgttgctggagacagtctactctatatgtagcatctcacttcaacaaacttctatctagtttggctctagtgagagagctattttagatactccaatagcttgacaagttagataaatagtctgttaaagaattattttgatgttgaatgactaaataactagtctatgggagagtagcaattctagttgctagccaagttcgcatctagcctcgtggtacaagcgaacaaaggagcaaacccgagacagcgacgggacgccagcccctccacgtgctggaggaggacccctcaaaacgtccgccacggcggacacgcaccaacaaacgccctgagagcagccatttctaacgcttacgcaacccagtccgcccgtgtctctggtgacaccgacacccgtggcatctctctcgtgactcccggagcagaggcatggacaccgcggcggagctggagctggggctggagttggagcagaagccggcggcggggtactggagcgtggtgggcgcgcgcccttgcgacgcgtgcgccgcggagccggcgcggctgcactgccgcgcggacggcgcgttcctgtgccccggctgcgacgcccgggcgcacggcgccgggtcgcgccacgcgcgcgtctggctgtgcgaggtctgcgagcatgcccccgccgccgtcacctgccgcgccgacgccgccgcgctgtgcgccgcctgcgacgccgacatccactcggccaacccgctcgcgcgccgccacgagcgcctccccgtcgcccctctcttcggcgcgctcgcggacgcgccgcagcccttcccgtccccggccttcgctgccgccgcgggggccgaggccccagctcagggggaagcggtggcggaagactacgggagcagcgaggccgaggcggcgtcgtggctgctccccgagcccgacaacagccacgaggacagcgccgccgacacgttcttcgcggagtcggacgcgtacctcggcgccgacctcgacttcgcccggtgcatggacggcgtcaaggccatcggcgtgccggtcgcgccgcccgagctggacatcggtgccggcagcttttgctaccccgaacactccatgaaccacattgtaagccgtacttttaatagtatatccgggatcctcctcacggacagatcacagaggttggatgatggtgataacgtagacgcctttcaatccctccttattgcagttgtcgtcatcctcggaggtggcggtggtaccggacgcgcaggcggccggcctgccggtggtggtggtggtgagcagaggggaggagcgggaggcgcggctgatgcggtaccgtgagaagcgcaagaaccgccggttcgacaagaccatccgctacgcgtcccgcaaggcgtacgccgagacgcggccgcgcatcaagggccgcttcgccaagcgccgctccgcggagggcgaggacgaggcgctggagcacgaggaaggggcgtgcttctcgcccacggggtcggcgcccgccgcgtcggacggcgtcgtcccgtccttctgttga

SEQ ID NO: 124 - DNA, 5651 bp, Zea mays
caagatttaaagggacatggtagttctagttattatcggtgtcctagataaattataggacaaaatgaacatgagttttgtctgcattagttagacctaaaatttagttagagttggctaacaattagttaaataaatgactaaaaattaaatccacctattataccgtgcttggttgagctagtaaaaatagctagctaacaattagtcttatatatatctatatagctctagattcttaacatcgagtcgccgcaaaaagaatcaacaagcgcacgatgttaacttcctccgagtgtggatcacaacaattttatttctattttttgagaccatatgttagtactatggcactcacaatcatatattctatgtacaagttgcattcaatatgaacttacaaaagttgatagatgtgttagggtgaacttatggatttccacttggccttcaagttaaggtcctgattttttataaatagggagaatgaaatgaaaattgttagatataccttttcttatggcttccatatcgatgcaatccataattatagggtgtgtattttactaaagtcatgacataggaaaattacatagcacccgtctcttctgtatcatttgtccacctatgaaacttataattctactcgtacaaaataactagaaaagtttaatatatttagaatctaaatttagttaaagtagagaaccttaggattatctctattatataagcatacatatctatacttttaacattaaggggtgtttgatttatagggactaatttttagttccatcattttattttattttagtacctaaattactaaatatagaaactgtaattctattttagtttttatatttatgaatttatgactaaaatagaataaaataaatttagccccatagaaaccaaacacactataatacaggataatgaaatgagaaacaaaagcaagggtgtttcccggaaaagaccaacagtgtcgccactcgccacagagcgctccatcaacacgaccgccggtataaacgcagcccccctccggcctccaccaaggccaacattgctcaggctgctcccaactcccatcctccccctcccggagtacgaagtactagaaagagagcggctttcctctaagaatggcgggtggcggcgccggcgacgacgacgtggtggtggtgagctgcggcggcagaggcggcggcgaccccggcgcatacgccgcggtgctcaagaggaagctcgacctgtactgcgccgccgtcgccaaatccatggtgtggttcctcctcctcctacccctccaaagattagacttttctaggcctatttgagtattggttgtgtgattgtgccttgtgtgcttcgatgtttcagtttcatctctagcttaatttcgagtcacaatggtaggaattgcatgtttttcagttatttccccccttcattttggggaggggagttttactgcaatttctagtttttggaaatcacaagcagcagaagaaaaagtcggttgctttatttgaggactctggaaaatgttgaattgattggtcggtatgcttgtcgtgtaatcctacgctgccattcttaagccagggctacataaaaactcacagtagattttagcacccaccaagcaccaacagatagaaagaaagaaaaaaaagtttcccagcctttgacaaacattagaaaacacagcactgtgcacacaccggcacccatttctcttatggcttgtgatgaacagtatgatcaagatcagagctgtgccattgtcatcgtagtactgtgcagcggcgaaatccaaatgttccaactttacatgggtaccgtagcagatattgctttctgatctgatgcaagtgtagtggagtcctggagtggtgaaactgacatgtgggataatagatttggtatatgtgccatgttgctaggaggcaggctcacttccacacactacatacactgtggtggccggtgggatattctgatggaatgttatggaccacaaatgatttgaatgagtatgatgtgtcggtggtcgagccaataggattttctcctttttgtttctttgtttttttcctggctgaaagcgacaggaaacaaaacaagatgtggatttgaataaatagaactgcaaattcactgtatttagctatttatccgatagtatcagatgttctattgaattgatgaacatgttcacagtttgcgatttgcacatttccctttctcagaagtaaaaataccatacttcactgaatgctagcagttttactgtggctatttttcaatactcttccgcagttgtttgaactagcaaggttaagaatatctaggttttcacaggtggcatgtccaaagattgttatgtgaaaatgaatttgcacgttgattttctaagttaattagcaccacaagttagtttagcagttactttttccataagtagatgctgtaaaaacattatgcatggtggctctcagtcaccctataaataacacacttacttccaattttcttaaatatttagaggctggccttggcacaaccatgatattgaccattgcatccaatgattccacaaaacttcgagctatgtgtgtattatttatataaattatgagggtaaggatgtgcagtactagtggctttccagagcttaacagtgacataaacctcgcgtactggctgcacccagccctttgcccctttgttgcagtgatgtttacgtaagtccatttcaggaagctaaatcacaagaacattcgttgggctaccccaactcacaagcttcagatgcttcgcaattgatttctcaagcttcctttgatggtatttatgacctctcataactgagtgcatgtcagtctatcaaccaacttggggtaaacatgcaggcaggaagatttcgaaggaagtagtgccttaggatggcaggatgtggtctggtttaaaagcatgttagatgccaaatcctattcagttcaccatctccccgctgatcattccaatagggcattagatgcaaacctcacttatcctagtacacttgattaccagccttggtttgagtactgtgagtgtgaagtgtgaaccattcactagagtctacaggttagtcttccatgataattacgtgcacaagatccgatctcaccagcagtttcagtaggataggttagctgatgctcaaggaatccaggtgagtagaaatatcaattccggattacctttgtggtgtggttgaggttgatgtgccggctcattgataattctggaggaatgatctaaactatgagcaatgttggtgagatcagatataaggatgaaaaatgaagtctgatactgcttcagttatactgaacagtcatgtcaactctgttggtgagctgcactgggcatgcaactctggcaccagttttgcactctggcagtgtgaagatatgatgcatgtgtggttcagaaaatatataggccttttttgtgacatttgaaccgttggacttattttactgtactgttttggtttcttccattctacacacaggtgacatagatggggcaagcctagttacaaactctaatgtcatagaagatgatgattttcaaggcaagccaaccaacagtggcacatcaaaggaactgtcagacgatgatggtgaccttgaagagaatactgaccccgctaacgccaagaagatgaggaggtaacatagcatcacaacattttcttgacgagaaatatgactgctaaatagaaaccattacttgattttgttgcgagtgaaagatagatttatcttgttagaaggcatcatattcagttttaccgttcactcctaccattcactgcctttaaaggcagaaagaatccaatcacataaagctttatccaattatccatgcccttaaaaactttcaaaaactgttacattcctagaaaaattggtaattccgtctgaagttgcgggaatagaaaccacatataccttttgccattagtttcctttttctatagatctgtcacctttaccttgaatttacatgaaacatggtatgtgacgtcagaagcttaaccgtccatttctgtgatgaactgctcagttaaatttcggtgttgtgatcagaatggtgtcaaaccgggaatcggctaggcgatcaagaaagaggaagcaagcacacttgaccgatcttgaatcacaggtttcaattgtgttagaatatagatgagtgctcaagttaatatccaactaaaatgaatatactcgtgctaattaccgcacaactctccaggtttccaggttaacgtctgagaatgcatctttgctgaagcgactggctgatatgactcagaaatacaaggacgcttccgttgacaataaaaatctaacagttgatgttgagactatgaggagaaaggttcgttcgtcttgaatgcatcacagacctttttcttcttttttttgttgtacgagaactcttaactgcatccatttatcgatcataacatttttactgggctctgtgtatactcaccgtaatcaacgtttacatctctctagatggctgcaaagggcagtgaaagtaatatgattgttcatagttcttattttagaacctgcaagttcagttttagtttctaatggtttttaactgcacacaaaaggtatggcagcattttcatttgattttctgaaattctgcataccttctacaagtgtgataggaataatttagttccttggttttgttttcttgcagtatcatttcagaaattttatttccttgtattatatatatatatatatttaaagaataacagtgttctcttacaggtgtgaggagttgtaaaacgaaacaaaacattaaaagcgcacataccatgccgcaatgcgccaagtgtgtgtcccattaagcctgtggggtgttgcccttgccttgccttgtggatgggctgctctatctcaaatgataccgagaggagtccaaacagaatactaccatacaaacatttcttaatgcttgtgtgtgagtatatgcacaactctgtactcttgtatcattagtaaaactgtgtttttttaaatatccatgctgaagggttctaacataatcatgttaagtttttatgaaaaaaatttgcttaaactatgactgttccaatcagttttttacctaaagaaggtattcacaagaatcttggcatttaacagacctgcacaccttgactttatgaaaagggacatgtcttcaggaacacagtactgttttaattccaggtgaacatagccgaggaagctgtcaggaggctaactgggatcaccctcatgctaccgaccgcttttgagaagcccacgagcagcgcgcccctgtcatcatgtccatctgatgcagcttctgcttctgcttctgccgccattgaagacagcgtgaagcatttcctccaggcgccacttgaaaacagtgggatcatcccaaacgcagcagtttttcagaccaagccagcttctctgcaccgtgttgctagcctggagaacctgcagaagaggatcgtcggggatgcaatgtattccgagaccgcgtcaacgacattctcagatcctgaagctcttgccgataggtaa

SEQ ID NO: 125 - DNA, 1767 bp, Zea mays
ggcggttcgtcctggatgtggatgggcggcccacgcgtgcagtgcttgtgcttcttgatcactgacgacccggtcgcctggcccaacccgggcaggccacgtcgaaccccgtctccatcccctcggcgggtgatggattcggtggggccggggcgggaggagatcgagtagcagacggcgacacccgatcatcaagcgttgagcgcggaggacgcaagggcggacgcgcggctacatcgaaacgagtccggacgaggaggagcggaggcaggcgcctccggtcggtgtcgggggcggcggcaggcaggtagccccacgcgtttccgcgggcggcgccacggccctgtctccgagctggaaatgatcaacaagccgacggaaaaccagtggcctgccgccgccgccgcaccgcatggcgcatgtgccgaagcccaccggccgccgtcacgtgccctgcccacggctctgatattttttttattattgattctattctacgttgccctgctagatttttttcttcttcctttttagagattctctgtgtgccctgctgattctcggtgttgtcagtgaagcgagcgaaagaccgaagaggtctgccgccgcccaaaagccagccgttgtcgccatctccacgtggccatctcctgatcctctgtcgctgccatggcgggggccctgccgcatgtcagtccgcgcgactttccttaacggcgactgctaagcaatgggaatgggatgggagtggagccgacgacgccacgctgacgccaacgcgtcttcccccgccgcctcgccaccgtcccgcacgcagcactgtccccgactcccccagccagtctccagctcacacctcccaagtcccgccacgcgcccgcccaactgactgactcccgccttcaaacttctcccgctcctcctgatccacgtaccaccaaatcctatatatataaaccagaccacaactcccgactccatccatcgccagccacgccatcagccatcgcgttccgcatcgaaccagcacatcgcaagacaagcagcagcagccaccactgccatcacatggagtacgccgccgtcggctacggctacgggtacgggtacgacgagcgccaggagccggcggagtccgcggacggcggcggcggcggcgacgacgagtacgcgacggtgctgtcggcgccacccaagcggccggcggggcggaccaagttccgggagacgcggcaccccgtgtaccgcggcgtgcggcggcgcgggcccgcggggcgctgggtgtgcgaggtccgcgagcccaacaagaagtcgcgcatctggctcggcaccttcgccacccccgaggccgccgcgcgcgcgcacgacgtggccgcgctggccctgcggggccgcgccgcgtgcctcaacttcgccgactcggcgcgcctgctccaggtcgaccccgccacgctcgccacccccgacgacatccgccgcgccgccatccagctcgccgacgccgcctcgcagcaggatgagactgccgccgttgccgctgacgtggtcgcgccctcgcaggcggacgacgtcgccgccgccgccgccgccgcggcggcgatgtacggcggcggcatggagttcgaccactcgtattgctacgacgacgggatggtgagcgggagcagcgactgctggcaaagcggcgccggcgccggcggatggcatagcatcgtggacggcgacgacgacgacggcgccagcgacatgacgctctggagctactga

SEQ ID NO: 126 - DNA, 2018 bp, Zea mays
agccaggctacagcgtacgtacttatcatctagcctatctaatcttctttagtcatcatgtcgtttttacggcaggcacacaccgcctaccacgtactgcctgccagtaaacgcaacacgacacgggtcgaacatgaacatgccttcggcggcacagtaccgcgcgcgcgcaagacggcagaccacccgactggagcgaactgtccgactcgtacgtcccccggccgccgcaacgggacaagcgtggcgcgccacctcgacgaccctttcggaggaagcccccttgcactgcacacctggcgccggtgacggcgaccgcgcgcggcacggcacgcccttccatcggaccacatgttccaattgcgcccgtctccgtccgcgccccgcacaccacctccggcgcacacctttccgccgcccattggccgctcgccggcgactccagcaatccaggtgctgtttggttcaaaaaatgtaacgcaaatggtaatggtaatggtttcggctcgattactggcggtaacaaatttgaataggctggtatcaaattttagtgtggtatcttattacggttggactaaaacaaacatgatttaacgttatccgttactcattacgttacaaatatataaaccaaacggcaccccagttcttccgtcggttatccctcccccccgcactgatcccttccggttccggctgagaagagggtcggcccggcccaccggggccgaagaatatctggggctcgttccgatcgcacgcgccacgtgtcgggcgcggatcgcgaggcggccggataaccattggacgacgggccacgggccggattccggacacttggccgggaacggaaacaaaagcggctttgcttgcctggtctcgcaacgagcggggcgggccctagggcttcttttatccgcaatcgcaaaggccacatgttcgcatcgccggacgtggacacgtaacgccgcgcgccgggtataaaacggggggccgagcgggacggtaccacggagtcccggccggctggtaggaagaacacacaccgcttctagtagctatagctaggatccaacgatcgatcgatccatcgacgacatggacaggccagatcaccagcagcagcagttcttcatgccgacgacggtgcaggtgccacagccacagcagcagcagcagcagctctgcgtcccgatgctcgacgagccgccgtcctcgtttttggcggggagaggcggaggcggggcgtcggggaggggggagaggaagcggcggttcacggaggagcagatacggtcgctggagtccatgttccacgcgcaccacgccaagctggagccccgggagaaggcggagctggcgcgggagctgggcctgcagccgcggcaggtggccatctggttccagaacaagcgcgcccggtggcgctccaagcagctcgagcacgactacgccctgctccgcgccaagttcgacgatctccacgcccacgtcgagtccctcaagcaggacaagctcgcactcaccactcaggtaatcactgtgaacctccgatccgcgcgcacgcgatatccttcctgataatctctgaacataacatgctgtacgacagtccgttgctgcatgactactgatcaaaagtttgttccatgactactgaccagttgagcgagctaagcgagaggctgagggagcgggacgaccgggccgccgccgccggcggcggcggccgcgagacgatggctagcagcagcagctgcatcggcggtggtggtgaggaggaggcggaggacgacaagaggaacgtcctgctgttcggatgcgtcgacatggagccgcccgccgagagctgtgtgctcgtcgggtcgacgtgcgcggcgctggccgacgtctcggtggagtccgagtgcgacgaccagcaccttcactacgacgacgagttcccggagtcctactgcgccatgccggagctgtgggagccctggccgcttgttgagtggaatgcggtggcctga

SEQ ID NO: 127 - DNA, 2109 bp, Zea mays
cctttacaaggcctgttatagatagccttactatcttttatctttatctatatctatatttatactaatttattaataatctaatgtgggcaccagatgatattatgtcactcgaatccacactaatttgcttcgtaagtttggtattaacgaccagaccagaccataagtatgttagtgtttagaaataaaaaatatcactggcctaaataaaacaggagctgtagtaggagtagagatgacctcgtggtgtgctccgcgtgcagactgcgcggggcaggtacactaaacgcgagaaggacgtgtgtgcgcacgagagtggagggcgctgcctacctgctgccacggcgcgggtgcccaggcacgcgtggcgcgcccaggtaggctcagcgaccgccgagatgacccgcagctatccactccactcgcacgcggtagcggccgtagggtctcgacggcagtgcctccgtgagctacgcgacgccacgtggactgccgagccaaccgccgcaggccgcgtcacgtactgccggaccgacgtagtacgacccacacgacagatgaagagcagaataatttatattaaaaaaaactattgatgaggtcgcctagtttgtccttgttgcgcccggagtagtacatcctgcctgcggtccggtccgggccacagactgaaagccgtgtcccaatgcccgcgcgccagcacgaatcgtatccggcaggcccgacggagaacgagatagaaaacacgggcagcagaagtgcccgcgcgcggcatctcattctcaaccaagctcgctcggcgagcggcggtcatgcagcagcggctcggctgggcatccaggggttcacggaacttgtggctgcagaatgcgccacggaaggctccaggccctcggacacgcgtccggcctgagtgacttggcagctgtccctctcgccccccacacccccgccaccacaagtagtatatgatgccgctcgtcaccctcctccccttgccatctcggggatccggcactcgcctcccttttccctttccgcgccccatcaccattgccacaaatagcaaccaaggcagtaagcctagccaagccaaccgacggcggcgagagtatatatacacacacacctgacgcctctgctgctgctgggatcaacgcggcagcttagtgacgacgacgactcttctgtctctgcgttgattaatggacagtaacagatccatggcgacgagcggcgtggctccgttcgtggccaagacgtaccgcatggtggatgacccggcgaccgacggcgtggtcgcgtggggcagggacaacaacagcttcgtcgtggccgaccccttcgccttctcgcagacgctcctgcccgcgcacttcaagcactccaacttctccagcttcgtgcgccagctcaacacctacgtacgtgctccgatccgacacgctgccttcgatcatacgtactcctccctatgctgtttttttttgctctccttgctcagtgacctgatcgacggcgacctgtcgtctgtctgtctccactctgcagggcttccggaaggtcgatccggaccggtgggagttcgcgcacgtgtcgttccttcgcggccagacgcatctcctgggccagatcgtccgccggagcaacggcggtaagcgcaaggacgacggcaacggtgccggctccggctccgccgacgacgaggacgcggtagccatggaggtggtccggctgaggcgggagcagcgggccatcgaggagcaggtggccgcgatgtggcgtcgcgtgcaggagacggagcgccggcccaagcagatgctcgcgttcctcgtcaaggtcgcgggcgacccgcaggtgctgcgccgcctcgtctccggcgccgggggcgacgccgtgttcgccgccgcggagccggaggacggcgcgagcatcaagagggcgcggctgcttctcgatgccggaagcggcggcgacggcgccgtcgacttcagcgggctctatagcacaaccgccggaagcgaagacgacggcgtcgggttcggcagcgattacctgcagccgccaccgccgtacgtgttccccgtcaacagcggcggctactga

SEQ ID NO: 128 - DNA, 6138 bp, Zea mays
gccgggtgtccacattaagttattaataaattaaatatagataattattattattattattattatttattttataatttattaatttttatttggatataaaaatatgtttaaattacctttgcaccaatataaattctagttttatcaaatttatagttttatttaacataattttatttcaacaaactaaaactataatttatatatatgtaataactatggtctgcaaaaatggggcttctaaattttaggaagtactgtaccttagtttcatatacacattgtattccaagggataagtttattccaccattccggcgaattttcgattccctgttctgccaccacaactacattgttcgatcgatccgtgtgccacaactccacgtctcccaggtcccagcgctagttgctaattttgtcgcggagccaaaaccccggcatcgtcctcggcgtcgacggtcgacctcatctgcggatctgcctcctcggctccacctccacgacgtccacgcacgtgatggccggccggcaaagtgcgcagcagccagcagcaagcagggcagcacaccagcacacggcacgcgccgtccacctcacccgaacggcgaacccgtgtggattttttttcgcgtggccgacgaagggccagcgcgctcggcctctcaagggcacgagcgatggccggggagcctcacgcgaaagcgccgcgcggtcggtatgcacagaaatcgcgccccgcgccgcgcagtggagcagcatcaccgtcgtgcgggcccgggacacacggtggcccgcgcttcggcgagccgggcaggagcgcgagggccggggcgcggccacgtagcggtgctgcgcgccttgggatggcgccggcgaacgcgtggtctcggcagcggccacgcgggcggggccctggccgtgcgatttgtgaaggctggacggctgggtcgcggccgctaaaaccccaaaccctgtcgggcaattaatgctgtccatggagcaggtttttcagggaggacctttccgtttggaaaccatgaggtagacccccctacggtctgtgttgttcccacgcagatggacctggacgtaaaaagtggaagggttttatggaattctcggggctgttgaggagctgaatcgtaggaacctgccgtgcgtggcgtcaaaaaagcactcttggtccaaccaaatacaatacaagcaagcgaccaggagggacaggaaggatcgcagcggaggagatagctagggaagggcaaatctgcagggcctgagagggtgaggtagagcgcgccagccagaatgcaggagcaggcggcgagctcgcggccttccagcagcgagaggtcgtccagctccgggcaccacgtggacatggaggtcaaggaaggcaagctagctactacctctggcatggcaccccgtgctgtggaactatcctgtgcatcttctttttggcttataagcttgagtttatcaccaatcccagttctttcattgtttttttagaacttcgttgttccaagttccaacgcttccgataggttctcgtttgcttttgtcgtgcaactgaactgctgcaagacttgtcaagcaagtctactcgagttcgagtctcgagctctctctccaagatcttgactcgtttatttggtgaactgatccagccacacctgtggtgtgattgagttgcagggatggagagcgacgatgagataaggagagtgccggagctgggcctggagttgccgggagcctccacgtcgggcagggaggctggccctggcgctgcgggcgcagaccgcgcccttgcccagtcgtccacggcgcaggccagcgcgcgccgccgcgtccgcagccacgccgacaaggagcacaagcgcctcaaaaggtgagcgtgagatttcttgtaaccctagtaatagtaccatatatactagcatcaacaccggcgccttcgtgcaagtttaattacaaagtatatgggacatatactgccccatatgttctttctttctttttttgcttttgctgctcgataacacagaaaagttggtagtatggaattcagtttgtttggatgaattgggatgagtgactgtgtgtcacgggctagctcatttgttgacaaaataaaatatctttcatgagccatgcgtgtttggatttagcgttgtagtggaccacattaatgtatccaccagaatttggtcccctttgtggggtttagataagaaacgagtgcctggtgagcaaaggtggtttggaagactatatatgttttcagaaacatgaataatgtaattaccgggattgcaagttgctaagtaagattgttagattgtctctataatagatcatgtatatgatagtgtactgttttacactatagacaatactatttacaggataatgttcaaaatatagagggtgagatagagagctgctagagccaaacttagacaatgacgctcagtttataacttgttggaattgtgcttgtgtctttatagtggcaacactagtaggtagggtcagatttaggtagagggtcaccaggatggtctccctaggcccctaaattagatggacccctccttatgttttcctattatatatgtattttaatttccgtacactaaaaaaaatctaaaaaacgataaaaaactgaagttaagtttacgaaaaacatcaatgtcttcgatgtatattttttagtataacaaaaagatagatttttattctaatatatttgttacttattggatcttatttacatgcatatgtgatggcggcatcagctaaaaaaagaaattttaaaaataaaatcattgaagaactatttaaggtctgcattgtctaagaacgtctaaacggtttgaaaactttatatattgaaaaacaattgttagttgatgttgatatcaacactatcattgatgacattgtatcaagaaatgttagaagaaaattttacaatattgtatggataatttgaaacatttttttatgttatatcaatttctattgataaaaaatatgtatatattgagtaaaactatatttatatagaagaggccccagtatttgtgtccgccccaggacattaaaatgtcaacatagacctgacagtaggaaaaagtggtcgaaacaaacttatagcattgaagacgcccgctgaaataaattgatatttgttagtctagatgaagcttcacttgacttcgttcagttcttatcagctgggtgaagctcttcacccactaagtaataatcgattattactgaaaataatttagtaattattgattattattgactggatgaagattcacctaaggtgacaaataacatatatatacatgctaattttacatcctagatgccaaataactatttggcaccagacccaaccctcgcacgcgcaatagctcgcagccaaacagaccctcccatccgcctacatcagtcgaacggatccaactaaggccttgttcggttattcccaatacacatggattggatgggattggaaaaaattcttaagaagtttgacttgtttgggattcaaactcatccaatcccactcaatacacatggattgagagctaaccgaacaagccctaacaattttttgaacaaacctatccaactaacaattttttgaacaaaccttatatccggactccactctcctaaaaagagaattatgtcctactagaacaagtgttaaaattgaaaatcgattttaccattgtgttcgtcatgatgaaagcctcaaatcttttaattaaaagatataccaaaaaataaactaaaaatgtatttgttttctatgcatgcatgcggcaggctggggggcggggacatgcatgcaatcgcaaggcatgggccaggctgcaagtgggtgcggtacgaaatagcactatcgcacgcgcttatatatctccttgctcatctaaatagttgtagacaacacttttggacatatcacatggtttcttcaggttcaattgtgtgatccttattgatcgtcacatcaacgcaccatcgaccatcgtcgtatcttatctactgttgagctctagtacaccatctttatcaacagcgtatagttattttaatttagcgtcacatcagctattgttttacggacattttgttaaaatgaatcaagacacttcattaaataaaaattcattcgagtacataactaagcacataaaaattacataattcataaaaacacataaaaattatataattcataaagattgaacaaaaattaattaatttataaaatataaataaaaaatacacaaattcctgaaactaaaaggtatataattcataatattttatgggattgttatatatttttgggggttttttttgtatttttggatttaaaatgatataaaaatgtgtgatgtctttaaatctggccagtaccgacctatttgaattggtatcgactggaccgtcaacaaaaccggtcgatatagaccgaaccatccaacatatttgttggtaaggtatgagttgatccgactctaacacggtcggtaccaattggatcgaccaattgattggtccaccaacaatcgttaagatctgtccgactggttcataggccacgtcatccttcaatacgagcatactttgtatctatccttagggcatgtgcaatcctgagtcgttagaatagttttcaaatacaagagataactaagaaactgcatgatataaccctaaacccctagataataaatatagtcaagacacaatatgtatagagagttgtgtagagacggatgctcttgattttcttcacttagccccttaagaacctttcaagagaccccttatttaattgggttgtacatgcccttatgccagcatctgtgttggtcccgcacctcttaggtcatctctagtaatttttgtattttaaactttactctgcaaacagtgtcaaataatattatttacagttttaagttctctattttacgcgatccactggaggcagtcttacgacggtaacgttggagtggtggtgtttgtttgacaccagtgatacccgtggacactagtggtgccgtggcggcggcggcgtttcagcatttgtgtgatacttcctaaacacaatacagcactactgccatattagttgttagcacactaatgctaatgcttccctaagcaatgctaatgccaatagagcttgtaagcattatattcctaacgacagtttagctggtatgcaagtacattattttattttaatcgatcaggaatggtgattactttatatgatctcaaattatggaacacattgtttgtgtgcaatttgaactcttagttgaattggtgtcacattaatatgaattctgggaaaatgacaaatttgtctcgatccgtattattctctattgtaccattgaaaaatgtctcaaccttcttcttttttttaaaaaaaaatactgtgttaaatttgcgatgtatatatactatggtcaatctggtcttgtgtcttgaagttgtcctgatttgctatgttcgtgacttgtgaaggttactgaggaacagggtgtcagctcaacaggctagagagaggaagaaggcttatttaactgatctggaggtgaaggtgagagatctggagaagaagaactcggagatggaagagaggctctccaccctccagaacgagaaccagatgctccgacaggtaaattttccattggtttggctatgtatttgggacagaattttttgttaaatttgtttagtacttgatatgcttcatcgttcgtggacacaatactgctgtctttattttacctatactgttgtaccataagaactgaaaccgttgtcttaaatttttgttaatggattgtattctgtattaccatggaatttggaattatattgggtttcaaggtttttgttttgtgaaaaaaaaatgttgggccctgccagtagtactcgagtagggtgatgcgagaataaagcgaactgagcctgatttagttcttcacctttttgcagatactgaagaacaccgctgtaaacagaagaggttcaggaagcactgctagtggagagggccacggccaatag

SEQ ID NO: 129 - DNA, 3744 bp, Zea mays
cctcatgggtggctccagcttcgcgcccaatagatagaggagtcgcacgctggctggattcgtgaacggccgctagcgtccgctccgctactgtactgcgaggggatcataatagggctagtttagtgaccacagaaattgagatgatatatttatttctaccaaaccagtctctagggttaatttggtgacaacagaatcatatggattggaaaaaaaattgagaagaaaatgaattaatttccttttcaatatcctccaattctcctgtaatcactggtagccaaattagcccttagaactcgtttggaggacagagaaataaaagaaatccatggaaaagatatctcctttattttcctgtccactaaatctgtccttagagcagatttggtggaaaaagaattggagggatccaaaagtagctgaaaaattcctctccacagatccctaatttttcctttcgccaaaccagctctaaatagtgaaggaattcttccttatggatccctcctatggtcaccaaacgacccttagtttatggcaaatccacccaaatttgtggaccgtcgcacatggtttgccgcagaacaattagttagtactccaacagcaagttggcaggcacacatcgtttcaagatggcaacatgctgatcccagtaaaaagaaaaaacacagggcaaagtatggctgctgacaccattgacgcgtaccgccactaaacccaaaatgggcttgtagggaatttaccgtaaatggttgtgccgtcagccttcagtctcagggtttatagtacatagtaaaaaaaagcaaaataaaaaattcggctggtggagagagagagaggtggagagagaggagaggagatgcggacagatctcgagaaataaccaaatcagaaaacggaaccggaaatgcagcgagggagggagggagggaggctgcccattattaactctccctccccccacgcagaagacgacgaccggaagcaaaacagccagccaaccaaccaaccagaccagggatggatggtgcgcaccaagaaagggggcaccgcaccgagccaatgatctgcaagaagagaggtaggatttaggcacggcacctatagcccctgacgagagagagagggagagagatttggtcttggataagagtggagagactggagacgggtgggtggagtgagagaagtcactcggggagcctccagattctgaatctcccgcaacccgtctcatcgccggagtggagttccaggtaagacgaggttacaaagatcctccgcctcctcctcctcctcctcctcctcctcctcctatcagcactggcactgcacgccgccgatctcttggggtcctcggcttcagacggtttctcgcgccagatttagcggtagtgatctttgtttcctgggcacgtcaacctcgacaggcagagaagagaagcctcatccttggtttgtctttaacttatcccatctttcctgctcggaacccgtcccccccatgcatgtttcagtcaactgtttttggcgagtgctgcacgttgctgattttctgttggtttcttgaggtctcctcgaggcctgttcaccaaccgcatgccaggtttccccgacttgtcttctgcagctgtgagtgtagcaccggcacggcaggcacctgagcagagctatgggcgtgtacagcagcatgcctcactgactgacgctgacgggcaccgcagcacagcacagcacgcactcacctcataaaatgggttgattttccgggacgctttgtggaatctcgaatctagccttttgcaaaccacccttattttatttccctttcatcgtttcatttgccggaagaaataaacacatttggttggttgtggttgcttgcttgcttagtattaagcgagaatttaactgcagctcatgaacagtctgtggaagtttcctccttcagcaacaacagttttctctggatttttagagttcttcgtcctttacttttttttgcccccttctatcatccagcaaccgtatccaatctttactgtgagtttcttggccatgtggacctttttggcttcctaggtgttttatctaaatactgttacaaatggccacctgttagtcaaccagaggtcagaagtaccgcttacctgaacaaaaagctccagaaacatggatatttatatatgggcataaccaagcttcttcatgtattatttttgcggtatttggtattcacattccaaacagtagaatttgcagtatcacgttgttctaataaccgtcaacatcgattgtcatgtgcagttgttctaataactctcaacatcgattgtcatgtgcaggcgagtgattatcgagccagtaagccatttgcaagcactgaactgaaccctcagagcgttgttgcgatggaccaaatcgctacccccgacgaaacagcacatgcctctgcaccttcagttcataagctgtttgatgctaaattaggccaccatagcgtgatggatggcaccttggcatccacgagtcagtcatcaaacatcaagacccagctgatccggtcatcaagcttgtcaaggagcatatcagttaaccttgagaagaggagccctgaatctgatcctgaaagcccacagtctcacgtctcgcatcctaaatttgcagaacccatgttctcgaattcttcgacgttctgcacaagcttgttttcgtcatcttcgacaacagagccatgccgtcaaatgggcactttacctttcctgcctcacccccctaagtgtgagcagcaggtttcagctggtcactcatcgagctcctctctgcttttaagtggtgataccggtttagatgtggctgaacagtcagatgatctgaacgacttgctcaatctttcgggagatgcttctgatggcagcttccatggagaaaacaatgccttagcttttgacgaacagatggaatttcagttcctgtctgagcagctagaaattgccatcactgacaatgagaagaatcctcatttagatgtaagttaacctagccccttaaccactgccccactataatttgaccatcaatttgggttttgcagcacaccagatcctttgttccagtttctttctagattttgtatggtgatattcctctgacacaatgcttttaggacatatacggcacaccaccacagctgtcatcacttccagtatcatcttgctccaatcagaatctagggtcaccagttaaagtccagcttagctcatctcagtcatcttctagctctgcaacagctaacaagtcaagattgaggtggacacttgagcttcatgagcgttttgtggaggccgtgaaaaagcttgaaggtcctgaaagtaagttggtcattctgctttatctctcacatgttttcaggttatcttaataaatagtttgttcatatatttacagaagcaactcccaaaggtgtgctgaaactaatgaaggtagaaggtctaacaatttatcatgtgaagagccatctgcaggtatacaattgtgtccgctgaaaaattaattctcccttctatgttttcattaacttacattttctcgcatatactcttcgtatagaagtatcggcttgcaaaatatattcctgagcctaaagacggtaagcttaaattacctactcactgtatacttctttataatagcactttttttctgaaaagaacaaacatcctaaatgctgactag

SEQ ID NO: 130 - DNA, 2636 bp, Zea mays
tcgcattccagagggcaatggttggggaaagtgaatagcgcgcggaaagtgaaaagacgcctgagtaaaaaatcaaacagtgcaatagggaccctctgtcagcgacagtagacaaaaaaatatccaacagatgaaaaaaaagcatatggcagatccaacggtgcacaaacgtggatgcgtagtccagtgcttcttccggttgcttgttctcagcctgaaatgcctgcgccgggttggggtaacaagcctctttcgctgtgtcgtcgccgtggttgaagagctgagacgcgacgaacttgtcgagcactaaaggcaggaggaggaggcttggggctctccaccaaccgagggcgcgcgagaagcctttgctcagggaaacaaacagacagacgcaactcaggatcgataactgacactcgattccttgaagcgatgaagtggaggcgagcatgaacctcgcggggaggtagcggcggaggcatctcgtcccgaccacggcggggaccatgaaagggcggctctgggagctagagctagccgtgcgcgccggcgtgatggagagagggaagcgcggtccagtagagcgagtagtgagcggtggtagagctgctggcttgccggtagagctgctggcttagccagtggtagagctgctggcttgccgtggtagaggcgatggacccggcagggcgttgggaagatgaacgggcggtcagtcgcattccagagagtaaagatgaaagtgaacagcggaaagcgaaaagacgcaatagggaccctctgtcaagcgacagtaaacagagaaaaatatccaatagatgaaaaagagcatcctggagatccaacggcgtacaaatcgagtgaaaacaacaagagaaacacacgcgtgtccgttagctttttcctttttgttttatcagtttcggttcctatagtaaaaagttggagtcgtgctaaacggaccttacaaactccgtcaaggcaacatctaaaattcaatttatatattttttcctttgtctgttttcataaaatgcaaaactaagactttctctagcagattgtacatataacatgtaaaacatcattttacaccgtagagaacgtcacaacactgtttatagaagatggcgagaaagcctaagaaagggaacccaatgcaacgtggctcaccacgtggcacatcacaattcatcgtgtcatccagtaagctgcgctaggcgtgtggccatgtggcatatcttgctagtcaccatgccaagtcatccgccaacggtcctactgtcctagctagtttataaatctcctctctccgccggcaaccttattggtatcaagaaaaacttgtcgaaaaatacacagggcacaatgtgcggaggcgccatcctcgcggagctgatcccgccgacgcggcgcgtggcgtcgaagccggtgacagaaggccacctctggtcggcgagctccaagaaagccggcagcggcagggacaagaggcaccagcacgaatacgccgacgatgacttcgaggccgccttcgaggacttcgacgacgactttgacgtgcatgaagacgacgaggacggccacttcgtattctcgtccaaatccgccttgtccccaggtaatccgttcgttcgagggtgcaagtgcaataatctgcacgggcagaatgttattcacgtacgcgcgtccatgggtttgggtttgggtgtggccatgacgacgttggcaagaactgcatgctagactgctagtgtaatctcaagggaaagagcccgtcttgtgtatagccctgcacgacgggcgcgcggcgagccagaagaagcagcgcgggcgccagttccgcggcatccggcagcggccctggggcaagtgggcggcggagatccgcgacccgcacaagggcacccgcgtctggctcggcaccttcagcaccgccgaggacgccgcccgggcctacgacgtggaggcgcgccgcctccgcggcagcaaggccaaggtcaacttccccgcagccagcggtcgcgctcgcggtcgcgcgcgcccacgccgcggcgacgacggcaacccacgaaccgcgccggaaacgcagcacccagcacagcccgctctgctgcctcgaggagagagagagacgcagaggaaggaagggatcgccgccgtgaagccagaagctacggagtcgttcgacgtgggcggcggtctcttcttcgacatggccttccccaccttcccagcctcgccgccgccgcaggccgtggatacgtccttcgccggcagcaccgccacgtcggagaccgggagccccgcgaagaggccgagatgcgacgaagactcgtccgagggcggcagcggctccgcgctggagctcgctgacgagctggcgttcgacccgtttgtgctgctgcagatgccctactcgggtgggtacgacgacgactcactggacggccttttcgccgcagatgaggccgtgcagcaggacgtgggcaacggcatggacggcgtccgcctgtggagcttcgacgagttccccgccgtcgacggttctgttttctgacgtttgcttactacgtactactactattttctgcctggtggaatcatatgtgatagtgctgcatgtgtctgcctga

SEQ ID NO: 131 - DNA, 2644 bp, Zea mays
atctatagaacataagtgttgtggtgaccttgatcaactcccacttgtagctaccttggttggatcgaattcaagggcaaatctagggggttacgctcttgccctataacgaccaatagggcgtgctggttcaatattattggaggatgtggaactataaccgccctccacattgaggcgagatcatttgctcctattcccggagtcggagtcatcgtgtcgtgtgcaccactttggttgatgacaaagtgcacgtcgcatgtgctccaacattaatccagctttaccgtgcctgctatgaaagctaccctttgtcgcttggagcagttgtgcgttatatgatccacttggtcagaccgaatattgtagatgttgttgaggagggtgacctttcgaatactcgtaaaccaccgatccttgaacttcttagcagcacgctagtgaggaggctcgatggtgaagttgcatgtgactgctatgtgatcttgaaatgccaacccttgttgtcgttgcccctcaatgggatcaaccagcgtgtgcctattaatataaaaacttataaaatattctctacttataaaaagatatgcaatgtataaagtttctccatcttttacagtcccgtcgccgttaaaacttggatagaaaatggattcaggcattcagcacaattgggcagggctgggccacgagccacgacacgacctgactgtccagtacattacccatccatccacatgcatctagccgggaagaggtgaggagataaaaaaaaagggaagccgagatatatcccccacttcccagggacagaaatctttgttccttggcgacactcgttctgcctctgggtgctccgggctccggctcaccgatgccccttattctcctcgctttcctttgggcccacaggggaacctggcacaggcgccatgcttcaccggcactccgtccggcagggccctctataagtaccgctgcatctcacggttctcttctcagaatgcaaaccacaaaacaaagtcaaaccagctgcaacgatcaagagcgaggcttccttgtccagctctccgctcagccgacacacacagattgacagatggcgtctatgtcgctgagctcgtcgagggcgcagtggacggcgaagcagaacaagctgttcgagcaggcgttggcggtgtacgacagggacacgccggaccgctggcacaacatcgcgcgcgccgtgggtggcaagtcggcggacgaggtcaggcgctactacgagctgctggtgaaggacttggagcacatcgaggccggcaaggtggccttccccgcgtacaggtgccccggcggctacgacgacgccgacagcgacaggtatggatcccattgggttttcgcgcgcgtttactaccgcgtcgtttccagttttcagccatctacttatagacactaccggaatcgcgttttttgccgagtgtctaagacactcggcaaagactattttacattcggcaaagactttaacgagtgtaacactcggcaaataacactcggcaaagatttcatcggtaaagggttctttgccgagtgcttttttttggacactcggcaaagactttgccgagtgttaaaaagcaatcggcaaagaaaaacactcagcaaattaagaatcgaaaaaaaaacagcaaaacattttttaaattctatgaacaactctctaaccctaccctgttaccttactcgttgtcatatcatttttcactattattttgaatcaaacttatatgttttgtaaatggtgagattcgaactcacaacctctctctcgcgcataccctcctataccactacactactacaccaattatgtttatattacgtttctattccccatgtactataacaaatcgagagtaatttgattatttaagacactaaatgagttcatttcaaaatgtgaccaactataaagttgcataactttttgagatctaaaagttttattttaatagtttctacatccgagaccgtttataaaatttgaattttaaatttaaaaacttcacacgaaattttcaatgataagatgatttcaaatcaaaaaattgtcaactacaaagtttcattacatttcaagacctacaacttttattttggtggtttttccatccgagacagtttgaaaaatttaaatttcaaaattcaaacatagttttgcataacaagatgatttcaaactaaaacgtaactcttcaatacctacaactttcatgttggtggtttttcctttcgaagtcgttttcaaaattcaaattttaaattttttaaattcagacgtagttttcgttgacaatatgacttcaaatgaaaaagttgtcaactataaacttctataacttctcaagatctacaaaatttattttggttgtttggtaatttgtttatctcagatgatgattctaacaatatgcacaaattctatacgtctctctcgtagtttcataaactacgagagagatataggttttatgaacaaatttatttttattttgtccggtagtgagactagtagaatctgctgcgtaagagttctcaatctgcatgtagctaatgccgcagattctgctttcttcgcaggctgaagcacctgacctga

SEQ ID NO: 132 - DNA, 2436 bp, Zea mays
gtctactaagagtcttgtgtttgttactttcagtgatcgaaatcacctagatggagaggtggcaatcgagaatgcggtgactattcagagagcttatgggtgacttgactcgggacttgtacatgattatgagtggtttaccgtgctagagagaaatgaagaaccacctcataaagagcactcggtccttgctcaaactaagggagagacacactcttgcgtagatgcttaaatgagaattagtgggaagtgtcgattctctgagacctcgtgatcctctcacccaacatcaaaagaaaaatcacaaatatctagcctagacaccatttcactttaacaactcaaaatatctagaacatctagaacatctttaaggttacatatatagttttaaaattattttattaaaaaaacataccaaatcataattaattctttccgcgcgtgtggcgtgttgctggtgtgcgcccgcggcaggctgtagtctatggatccaccggcacgtacgactccactccacgaacggttaattaattctttccgtgaagctttatggccaggctcacgcgtgtattactgtttgcacgtgacttttttttacagttttgctatgttcaggttcttggacaaaaatataaaaataaacacaagtgactatggaagcaaccatccatctccatcattcaccgagagggatgagctagcgagcatcaacgagcgcctgcaacgtcagttttttcaacgcgtgcgaactgctgctactcctaaatgcatctggatctggctgtccgaaagcgcagcggggcacttgggcgtcgctatcatggcccaaggaagagcctgaagggccgcccgcccgccccgccagccccaccacacccacctcgacgacgccggtcagcctgcaccgtggcccgtgccattcctcgctgtcgcttcccgtcttccgtccacctgctgctgacgctgacgctgacgctgacgtaagagcttgccaggtcccgtcccgatgagcagcgcgccgccgccccacgccacgcacacgcggcggcaaacatggcatcgctgcccacatatatataaccagctcgattagctcagctggacacgcacttcacccgccaccaccgacacacgacggcaccagaccagagagagcaagcataagcaagaacagagatcggacacggcccagccaaacccccacccgaccagcgagatcaggcattgatcggttcagaccgtacgccatggaggtttgcagccctagcgatgacgtcatggaggctcagcggcggcagcgcgagccgacccaagccgggggctgctccgacgaccccagggcggtgctgacgtgcctcaccttcctggagcagaagatcgcccacctccgcggcatcatcagcgcagcgccgcggccgccgcggcagatggtgtcggccgagctcagctgcatcgccgtccagctcgtctccctctccaagagcctcgccgctgccggcggcgccgcggatctggacgacggcgccgcccggtcgccggctccgaacgacggcggcgacagcgactcgtccgaccacgaccccttccacgccgacgccgacgccgacgacgacggccgcctcccgccggccggctcctacgaggtgatcgagctcggcgaggaggagatcctggcgccgcacgtgcactcgtgcaaggtctgcggcaagggcttcaagcgcgacgccaacctgcgcatgcacatgcgcggccacggcgaggagtacaagacggcggccgcgctcgccaagcccgccgccgcggccgcggccacggcgcagtcgtcctcctcctcctccgcccggtgcttctactcctgccccttcgtggggtgcaagcgcaaccgggaggcgggagcaccgcagcttccagccgctcaagacggccgtgtgcgtcaagaaccactaccggcgcagccactgcgacaagagctacacctgccgccgctgcaacgtcaagcgcttctccgtgctcgccgacctgcgcacgcacgagaagcactgcggacgcgaccgctgggtctgctcctgcggcacctccttctcgcggaaggacaagctcttcgcccacgtcgccgccttcgacggccacgcgcccgcgctgccgcccgaggacgacgcggctgcccacaatgttgccaatggcggactcggcaccgactcttatcgccgcctgacgacgatggacaccgaggcagcgagcttggagttcttctcggacaccatgctcgatgctctcagctgttctgacatcgagggcttcgcgctcatggatggacaaggacagtgtctggacgacgacggacgagggtcgctctcaccctggccagtggggctcgattcctgtgactttgatggatttgatctcttcggggcaccaccaatcgatttctga

SEQ ID NO: 133 - DNA, 5789 bp, Zea mays
tgagctctgagattttcatatggggtttcatctctagcctaccccaacgtgcttgggacaaaaaggctttgttgttgttgttgtctaaacatttttacataggcatttgcaaaagtggttcattttaaattggacatgattagaaacaaacgagatgatagcataattacaaatgtatctattgatttgtttcaatcaaagtaaaggaaaatgtaatcgttaataaagaagagaattataccatataagttgagataaccagaaaagaaaatttctactatgactttttctgttagacagaaccatgtatttgatggcaaggtagtgggggtattttacatataaaattccaaccttttcagaaacagttgtcccggaatttgtggtttgcctttatttgagtagagaggacaaattttgattggccctacaccaatatatgctagaatctctaatcaagagaccacccctgatcccctgttttcaccactgaggttaggccctgttgcctgcatttcagtggtcatgcttgtgtcaccggaatcagaattgacaaatgaatttggtgagttattcaacaatagttacaagtacaaggcaccttttctacaaaattcccaaaatctaccacagcatgaatagacagtttgggtctcagttcctcttgtttatatgtgaaaaacggccgtccccagttcctcctgtttgcaaaccaccattttaaaaaaaaaatctcaaaaaacactcgtggtattgtgcaagagaggattttcttaccaaggaatccttctgaagctgcagaatcacccttgcaagttgactttatatatggaaaatatggaagcgccaagcgggtatggacctatgattggattcctgcgtggtgcagctgggccctcagtgaaagggaaagattctaacaaataaataaaaacaaaattacgatggtgtccccacaacctttgttgtaacgacgacgccaaaaaataagggcaacaccaagcgaagcccggccaagcaattttttttgttctcctttccgtttcgcagcgcagcaggatccactaggaccactagatgcagtggagcatcgagccatttccgggggtgagttgaggtgagcagaaccgagctacctggtggaggctggcacctagctaatccacaggaggaagagaggagaacgggagcctttttgatgacaagaacggaggcgtcaggcgtgtgattaacagtgagctgcttgctacctaactatcaatctctttcgctgcttgctttccattgaaaatgatgtgttctcccacaccctgcaacctgaaggcaacatgcctagcacaaaattctcccaaggattcccatggtttcctagcccaagatgtgcatggagccttgcttcttgatctccagcagaacagaagtgaagcactgtggccttgcatgcccaagttttgttgttagcgttaccaagatcatagctaccactgatgcagtgcgttcgcgatgaactgtgtagagcaggttctgaagagagtgttacctgcatctgcatggaagagggaggagacccgcagcttccgagcatctccgtggcacgcaccacgtccgaaggcgcgggggccgtcgacttggatctccttgagcagctactgtccggcgacaacggttggctcgaggtggtctcgcgctcgcccaactcggtagcgtttcctccaccctcggccttcttctcggctgacgcgacggccaccacagtgacgacgacggcggcgccggccgcgaacgccagctggttgattcagacgggcggcgcgagcaccccctccgtgcgggagcggttcagccaggccctgtcctacatccgtgatacgcagagcgacggcgacgtcctcgtgcagctctgggtgccggtcaaccgcgatgacgggaagctggtgctgaccaccagcggtcagccgttcacgctcgaccaccgctccgacagcctcatccggttcagggaggtgtccaccaagtaccagttcccagccgacgttaggtcaggggagtcaccagggttgccagggagggtcttcatcggcaggctccctgagtggtcgccggacatcaggtgcttcaccagctacgagtacgccagggtgacagatgcaaagtacctcgatgtccacggcaccatggggctgccagtgttcgagaaaagaagttacagttgcctgggcgttatcgagctgatcatgacaaagcagaagctcaacttcacctctgagctcaacaccatctgcagtgctctacaggtaggagacctcaatctcactgcccctgaaagttcagagaagtataccgcaaatgcgttaggttaggagatccactcaccagcttaggacatgtttagaagcacccaatttttaataaacttatggaggacatatttagaagcacccaatttttaataaacttatggaaattgaggtggttccaaacatatggctcggtttatagaaattgaattctcaatttcttaaaaccaagaagctaatttctcctaactaaaatataaaaaccagttttttaaaaaccggcttgaaatacctgcacgacaattatttactgtagaaaatcaatagagtgtttccagatctgggctttcctattatgacaagggtctttgcaggcagttaatctcagaagtacagaagtttcgagcattccacgcaaaaaggtgagcagaaaataaattatacactcgttgtatcgcagctttgaaaaatttggcaaatatctcatttttacaaagataagaatcgcaggacctctatattccaatttaatgtaggcatgtatgaaaatctactttaaattgcatgtttgtgaaaaaaaaactttggacgtttcaatttacctaccctagctcaaatataaagcaagtgtataagatattgagacatgaaacggcgatgcttatatatgctcacatgacttcatggccactcttattgattgtccaccagtttagcactgcttcctacaaagatgctttaccagagatactggaggtcctgagggcagcctgcttgacccacaagctgccattagctcagacatgggtcacatgtactcaacaagggaaacgaggcagccgacattctgacgagaactacaggtactgcatttccaccatcgacgaagcatgctttgtgaatgaagccgagatgcggggcttccatgaggcctgctccgaacaccatctgctgcgtggcgagggggtggcagggaaggccctcacgacaaaccagccatgcttcctgccggacattggatcctcaactaaattggaataccccttgtctcaccatgctaagatcttcaggttaaaaggtgcagtggcgatccgactgcggtgcacacgcactgggatagcagacttcgtgctggaattctttcttccaacagattgtgaagcactggaggagcagaagacagtgctggactccttgtcaggcaccatgcgaagtgtttgccagaccctacgtgtggtcacagatagagagatggaaggcgaagcggcgctggaaatgaacgagctgaactcttttactcctcctgagaaggacaaagatgagttgtcctttggaggcaattcagcagatcgtagaggggcctcttggacaagtctggcaggaacttcacagcaagaacccgagttagctgcattgcggatgcatggaacgttctcacctgtggggcagggtccatctctatctggtgttcaggcaactgctgaaggcagtaagacaaaaaggcgcacaaaggccgagaagaccgttagtttgcaggttcttcggcagtacttcgctggtagcctcaaagatgcagcgagaagccttggaggtgagtgaatcatcagataaacgcaagattcagcaaatgatagtttactaccatcaggcacttagatggtgtttgaatgcactagggctaatagttagtggctaaaattagctagattcatccaaacactctagctaatattttagctattagctatttttagtaaattagctactagttagctatttgttacctagctaattccactagcatttttttagccaactaactattagctctagtgcatccaaacacccccttaattatagtagtacaactaatgcagccagcatcctaatctgattaaataatatatagtgttactttccatcagagagtcaaccatcacatgcatcccatagtcagaagatgaacattcttatcagcattatcgtgatctgtgtttcctttccatgtatagtataccactagtccactatatagaaagcacatgaacatgaagagatataatgcaagtacagcacagcagaaagtcaactttcaagagctgacatagcaaataataatattgaatcagcgagcagatcaaccttatggtttgtagctgattgagcaaacagtgcacataacctagaaatgagttgatcagtttcagtatcattcattgcttgcagttaaaaagcaaccggataaaacaaaacactctgcatagaaattatgaaatgatcaatatgatgatctcacccttaggcccacaaagtaacttatcatgatggcaattttggcatacatgtaggaagacatacattccaaattaagcccataaacaacttattagggtgacatgatatgacgttttctagaattagaatagatggatgtagagcttcatgtaggtaaaattatttcttgcagacaaggggcagacagcatccttatcatgtctgcattgcatctccagattgtgatagaatcttttatgacagacagcatgcttatatatcgtttgatctggttgcaaacttgcaaatatacttacttttttatctctcccagtgtgtcccacgaccctcaaaagaatatgcaggcaacatggtataacccgctggccatcacgaaagatcaagaaggtagaccactctctaagaaagctccaacagatcattgattcggttcatggtgcagagacagctttccagctaaacaccctgtacaaggatctcacagacacctcaatatcatctgacaacaatttgtcaggaagtgtcacggttcctccaactaaccagagcaatctcaccgacttcaacaagcaccaaccccacaagtcaagtagcaatatgccatcaacttcacactcacactcctcatgcagccacggttctcagtcaagcccctcgtgtagcgttggtgcaacagaacatgcacaacagggtataattgatctgatgaagtcagaaaatcctgtgaaagacagctctattcagactatgcaaacagaaaacacttcattatatgagcatttctcagttcatgaggctccaattgatcttctacaggatgttactgaaaaggctaatggtgcacatcattcttctcgaagcctgtcatcccccaaccccaagcagaacacagatgcaaatatgagagtaaaggcaacatttggctcagaaaaggtgagattccgactaaacccagagtgcaattttcaaggactgaagcatgagctagcgaaacgtttgagtatagtagacacaaaccccttggttttaaagtacttggatgatgattcagaatgggtcttgatgacatgtgatgcagatctgcaggagtgccttcatgtatacaaactagcagatatccaaacaatcaaaatttcagttcatttagctgttagtccagctacaagggtcacagctggtcacactggtttgtcatga

SEQ ID NO: 134 - DNA, 3728 bp, Zea mays
gaccctggtaatttctaaatatctaatagaaaaaacggtgttaagagcaactccaatagttatgtaaattttagctctctaaatcatagatttaagaagttgctaaataactttgggagtaaaaaatgcgagttctccaatagttctctaaatataggttgtagttttgttttgtatctatccacataaaaaataaagtcacaaatgtcatcaattatcttcattatctacataatgcagtaaacatttttgtttagagagttgctaaatggttgccaaatgtagagagtaaataaggttagatgagaagttgttaaatttagaaagtttatttagagaactgttggagatgagtttttgtgttaactacttaaattgttgatttaagaagtctataagaaaactactgaagttgctctaataacaagaattttatagtgaagatccaaaagataatactgatgaccctgataaaatatttgcttagcgaagctggagatgtataaatatatgcactgatcatcagaaggaaatacagagaacatagtttatttgcgtcattttatctaacaataagctgaaggaagtgttcgtttgcctaccaaataaatacgaaaacaaagaaaagaaataaaaatcgcaacaatttgatggacataagcctaccttttatgtgatactccggcccctgtttgcgccaaaaaagaaaacttctatgtaactatacaaagctttaactgccggcaaaacgatctttgctacaatgattcacacttggctactgaatccaccgtgaacgcgtaaagaaaggacgacacgcgtcgccacgatcacaaagaaaaatatctagtgtactgcctcctgaaggaatctttgccgatttggtacccgaatgtgctgttattaaaatagaataaactttcctgacaatgggcagggccgatgcgtcgtgggcctccgctctcgcctagtagtccaccacgcggccacttgcaccgccgtgaatcgtgatcgtgctcttctcgcccgcccggtcttgtctctcctctccagaaccttccaacggcagagtgctcgccgcgtggtctagaaccttccacaagcctcgcgacgtgtctcgacgcgccggtacggcggtgggggtatttaggggtccggccaccggccaccgcccgcccttctcccgatttcaccgaccatttttccccatttcacagcgggcgaatatctctcatctcccccatcctctttcctgcaacaactcctacccacccgacagaaatatcctaagcgctgacccgaatacccgattcgctcctcgtccggtcgattcctgctcctaatcgctcgaatcgagtccttgccccgtgttccgtgccacaatctgggcgcttggctcccgcgagccggggttcttgggcctgggcggaggccatggacaagccggtggcgccgggcattatcaaggaggagctcctggagcagcagccgccgacgcaggacggtgtgggtggcggcggggatgcgccgcgcccgatggaggggctgcacgaggtgggtcccccgcctttcctcaccaagacgttcgaccttgtggaggacccggccaccgacgccgtcctctcctggagccgcgccggcaacagcttcatcgtctgggacccgcacgtcttcgccgacgggctgctcccgcgcctcttcaagcacagtaacttctccagcttcgtgcgccagctcaacacctatgtgagtcggcaaaacccaaaccccccttcttcctttcctttgaaataatccttctcttggtcagggcttgctaatggtaatttgcgtttggttgcaattgcaagctgctttattcggcggagagcatccgaatcctctgcaatattacttgtatattaaactagtttgcaatgttaggacaggaaaatctgttgtgcacttgttcttcactaaagttttaggtgatgtaacactgttgtgaggcattgttgtgatttggtgcattttttattgttgattttaggcagctggttccccaatgagatcgaggatgcctggctaagatatgaagagacatagggctggtttggtgacaaaggaattgaaggggatctataggaagaaaatcccttgctttactttgtcaccaaatcagccctttgccttgtttggatactctagtattccccctaattcacatgtgttgagatatattggggtgtaaattagtttaatttatactctaataaacctcaacacacgtggattgcggtgaatactagagtatccaaataaggcctaaggggtattaaccccctcccccccaaaaaaaagtcctgggaatctatttactgatttcacttatataggtgtagtgttaggaaacattttagcgtcggaaaacaagattttgaagcaattaagtgattttgtattttgtgctctttgaggttgtggaaaacaagactcgaagtggttgaagtgattctgaccagacctactgcattatgttttgagcatatctggtcgtgtagtgggtttatggcagtagggattcagtgctatcgttttcactcattagcgcatttgattgtaaacaaatacatccttgaaagtgtttatgatacattctccggtgaacctcatcttcaggtgaggcaaagagaggggagattaactctcccagcaaatttataatcctgacatggtttcttgaacttttttattgtagctagatggaacaagatactggatgaagtaccaagaatcagattgttttgttctagaagactctactgaccaccttcacatgctatagtatattgctggcctatcattatccctgttattgcagatataaatatacaaaagctgaaatttacagagaacctcatccaagcgaacataatgccttatgactgacctgctgatgaccatttctggtctattgcaacctgcagggcttcagaaaggttgatcctgacaggtgggagtttgcaaatgaaggtttcctcagaggtcaaaggcacctgctgaagatgataaagagaaggaagccaccatcagctgtggcaccattgcgacagcaacgtgcccctgcttcttgcctggaggttggtgagtttggatttgaggaggagattgataggctgaagcgtgacaagaacattttaatcacagaagtagtaaaactaaggcaggagcagcaaagtactaaagatcatgtgagagccatggaggaaaggctacgagtggctgaacagaagcaggtacagatgatggggttcttggcaagagcaatgcggaacccagagttcttccagcagttggcccagcagcaagacaagaggaaggagctcgaggataccatctcaaagaaaagaaggcggcccattgacaacacaccattctacagtgatggggaaagcgaacagcttgattcacagttgaaaatgttcgagtcaggtgttctcaatgggctcaatgaacctgagctggagaatttagcagtgaacattcaggagcttgggaagggaagcatagatgatgggaacttgactcaagttagtgaccagtcagagctgaacgacgacttctgggcagagcttttggtcgaagattttggagacaaggcaggacagccagagttggagggaagaactgaagacgtgaatgaccttgctcaacaactggggtatctgagttcttctagcccaaaatag

SEQ ID NO: 135 - DNA, 5305 bp, Zea mays
ggctggaccctttacacaactgattccgagctaattccgcgaatctagctaacaaccgtagcacaaaactcggaaccctaatctgttctgcgcgcgcgcggaccgtccggcccacaggcgcggaccgtccggaccgcggaccgtccggcctcagggctggcctgtccgcacctcaatttggtgcccaagaggcatgttttcttctctatcggattattgtgcaatagccatagatatcttgatggttctatctgtccatgaactgtgtgtttaatgcgtgtgtctaagagaaaaataaaagggtatatgtttagtggaagatgttgtgggtctttaaaactggtagtcataccgtgtgtttatatggagtcaatgtcttgagttataagtcatcaaggctgctataccatatatagaccgtgagaagccaccaagcccaatacgacaggaagtcgtacacatataataacaccccgttagctgaatgaggacgagctacagagagctctataaaaacagcgattgtgttctttttcaactcatatctttctcggtcttttggctaaaataaagtataatatttatttcgctcaaccattgattgcattgcgtgtacgacctcgtccttcccaaccaatatcatgaaaatacgattgtgtaccgtcgcaatgcacgtgtattatactagtttatgctataaatgagacttattatggtaactcgtgagctcaatatccaattcgtaatgcgaccaagctcaagctattgcgatcgagctcagccaagtctttactcgctgagccattgacaattttgccattattatttgtgggtttcgctatatatcatcggacctacaaattatagacatagatgatcccaccagttatagacatgagatgacatcataatatgaagtcaaaagtgaaactgtgagagtgacaaaattataactttctcttacttgctggtcatggagacgaaccgacccgacctcatttgcagcccaacccgcactcaccaacagaaagggaaaagaccatcctacccacgccagctccggagttccgacgcaacttcccattccgatccacatcagccccgtcgctgtctctccaggatctggagaccctacccgcctgagccctcagccggccgcgcggtgcggcaccgcaccaccgccaccgagccacgaacccgccggagtaccgacccgcctgcgccctccgctggccgtgcggcgtggcagcgcaccacctacggcgggctgcggcaccgccccggccctcgcaccagttccgcggcgacgtggtccagcagcaccgccaggccgcctacggccatttcactcgcggcttctgagcatctacctgcacttcttcaattacctgcagctttcatcgtatttcctttgcattgcataccgtgcagccacctctgcacatgatgtttcggatgttatcttattattaaaaaactagatttactcatgtttttcttcctctgtcattattgctgatttggtaactaatctttctgtggggtttatgcactgttaatttttccctgtcattttaggtctaatttgtattcgacactctcatcgtagtaactgcctcataggttttgtgccctctgtatacatctctatcggctccatgtccaaggcactgcaccacccttttgttatcaggtaacaatccacatcacacctccgcccgaaaaaaaaacttttatcaatagagttctctttttgttaacctcctttacttttactttcaggttttaaaccggcttttggaattgtacacatggatcaatttgtgggagtggaaattagagcagatttctgtgcttttttttttccagcacatctgccagactagtatcatcagcaattgtccatcgcagcataggtacttattacttttgtagtcctattctcctgcataagtacgctattattggtaatcatttatacgctgttacgttcgatatttcttctggtcttcaaatgttagttttccaccctcatacaagacaactagatgttatgtttggatcatatatatagtgtgtttgccactgttaaacatggtgtttgagtattgtaaaaccatactaaacaaattctctgtccctggattattgtatttgatagcttcacatattccttccattattcaacaatttcttgatttatggatccacatatgcatgattggggaacggtagatctaaacagtgaatctggaccatacatgcatgaacaacaccgtccagatctagaactaccaccagtaaaaactaccgcaagtgggaaggaaataaagggtgggtagtatcgttgcctcgcaggttgggagaacatgtttaattatgctgcaatggctcgatttagttgcctagtagctgggactggtccaccaacttaaaatatataaggtacatgtccacacatatataggtagtggagaagatgatggcagaaacaggagttgaaatcagtcgcaaccgtccgcttcactctcgctatgactgatgaagatgttaggaaataaagatagatatggttagacatatttggagataataaaactctcagtatttattttataacagaacaaagttcagtctctatcgtctagagaaaacaaatcccttaatataaagataaggacagaatgctagagatgacttaggttaggcctagtacaagttgatttaaggcctgtttggtttgatgcctaatttgccacactttgcctaacttttctgcctaaggttagttcttcaattcgaacgactaaccttaggcaaagtgtgacacatttagccacgaaccaaacggccccttatactccaactctcctcacatgcacctataaatacccctgaggggtcaacaccagaaaaaccaacaaatcaacagcaaattgctaggctttttcatatataatatccatcttttttccacactcagggaccccaaacaaaagttgaattgtacacattgaatcacatggaatgagccagatgcaatgagggctgcctgaaagtgtataggcaggcagagcacagcagcaactttcgcgttagatatttgcggatgaatagggcggcgaggaaactatctgttgacctggcagggcgctttgcggcttttcctgtgtatttacgcccgctacctcacgctcgaggttccaaaaggcggaacggctaagggggagtggcaacgactgccacaaaacccacctcgtggtcattgctttggaatccccttccctttccctttagccaaagacgctctgctcagcataaagagaagggcgggcggcatcttctcctcccttccctttgccctaccttttgctatactacaagagcttcaaattctccgccttcattcatgcatgctttctgttggcaaacaacaaacatactagcactgctttgacttaaaaggttccgagacagcctgatggtcaagagagagatagtttacgtacctgcaagtgtgctcaggcaggctggccccggccggtctaattctgcagcctcgcatcgccaaacagagcatcaaatctttatctgagagcgactccgtgtctgaaggattggtgctcacgtcgcgacatccaaagccagccacaagataggcacacagcgctgctccgcaccaagaatgacgccaagtgtcacgccctggattcctctggcacccaccctcctattagtactctgcactggacttgcagcgctggtgacctgacttcccccacatactcatactgacagtggatccatcactgcaacttcatggattataattttgacaccagcgtcctcgacgaggacgtcgccgggagaggaggcagggaagggagctgcccgccagcatgggccagggcgtgcgacgggtgccgcgcagcccccagcgtggtgtactgccatgcggacaccgcgtacctgtgcgcgtcatgcaactcgcgggtgcatgccgccaatcgcgtggcctcgcgccatgagcgcgtgcgcgtctgcgaggcctgcgagtgcgcccccgcggtgctcgcgtgccgcgccgacgcggcggcgctctgcgctgcctgcgacgcgcaggtccactccgccaacccgcttgcggggaggcaccagcgcgtgcccgtcctgccgctcccggccgccgccgtcccggctgcctctgtgctcgccgaggcagctgccaccgccgcggccgttgctggtgacaaggacgaggaggtcgactcctggctgctgctcaccaaggacccagacgacgacgacaagaaccacaactgcagtagcaacaacaacaacatcagcagcaacaccagcacgttctacgcagacgttgacgagtacttcgatctggtcgggtacagttcctactgtgacaaccacatcaatagcaacacgaaacagtacgggatgcaagagcagcagctcctgctgcacaaggagtttggagacaaggagggaagcgagtacgtggtgccttcacaggtcgggcagcagcagagtggctatcacagagttattgggacggagcaggctgcctccatgactcccggggtcagtgcttacacagattccatcagcaacagcgtgagttcatctattactactaattacactacgtacgcgtctgccatatgccatgctatttgaaaatctataataaggggtaagtactccaaatttcatccccaccatttacgttccattctgtatttcaccggtactttgcagctgttaaaaaaaagatcgcggctttttccatgtgcagcagaattaacgtccataaattaaacctcgtctactacatatcattgcagggtctatgacacctgcaacccccttacgattcgcatatttcagtgaccatttgccgattccatctcagatctctttctcatcgtcaatggaggtgggtatagtaccagacaacatggcaacgacagacatgccaagctccggcatcctgctgacgcctgctggggccatcagcctgttctcgtcgggtcctccgctccagatgccgcttcacttggcctccatggacagggaggccagggtgctgaggtacagggagaagaagaagagcaggaagtttgagaagaccatacggtatgcaacgaggaagacgtacgcagaagcacggccgaggatcaagggacgcttcgcgaaaagatcgtctgatatggatgtcgaagtggatcagatgttctcagctgcggctctgtcgtctgatggtagctatggtaccgttccatggttctga

SEQ ID NO: 136 - DNA, 2528 bp, Zea mays
cacaacatggccaataacaacgtggtagagtggcatggcatatggatcgcaggcatgatattggtaacttttcgtagtttgtttctgatggcaccaagtccaccaacggatgttggcacgatgacgaggcgctggtctcagtgactgcttgaggtagtaatggctctaacagacaaaaacaatatatttacgactttgatgacatttttagagaagagaagaaggtacaaatacacaatacattgcatatgatgatctagaattctaaatttataagaggtaaacaatttgtacttaatttggacaagagttgaccaagacatggagctcattaagaggattctaaaacgatttgacctaaatagaaatatcatggatatgattaggagtggcaatgaatcacgatccaaatgtttttccataattcgtttgagcccttaattaattttagtttaaaaatgaatagaattagagctcaattataatatgatctaatccttaaattttatagtataaattttagaggctgttgccatagttgattgattgtgagcttgaggtatgactagataaaaaacattatctagtcattaattgctcatagctgattgattgtgagcttgaggtatgcatagttaaaaacattatgatatcaaagtatgtaactcactctcgtctcatgctaaagatgtttcacaaggctgctaaggtatgctgaagggcctatttcttggaagcagaagacttccgttgctgaagttcaatatttatccattgctttatcaccaatatatttgcattagttccagaaatcaataagggctaatcaatctggggaagatattttataggtcacttggagcagtttagagcttgttcggttattcctacgcaatatagattggatgggatagaataatttcagtgtggtgcactaatatgttatgcttagctttttttaggaaatattattattttcttactgtttgcttcattctgcagcctccagaaaacaattgaccgctacaggacatacacaagggaaaatgtcaataacaagactgttcaacaagatatacaggtgaagttctcccagtatagtatgtatgacctacctggttttgatcatgacagacatgagttactactagtacttacacgatcggatatctgaagtgatagactatttttcttctttctgtactgatgagatgtttttgttcggaagatacttaatttgcccattatttcagattctattacttttcatgtggctgattgtatatactaaacacatcttttgactgttgcatcttcacttattacagcaaaccagaaagtgaatttgcatgagcgtttttaatatatataaaccacaacgaagatggattaaacgcttaactgaagagttaggaataaaggcaacattttcatgtgaatacttttacctccaaagcattaaagtcatgttatacagcatcacttcaaaacatgggtaaaagtatcttcttgaggttattaggccagtgctctcaatataagatggaacttgcattagatatttggggttttacacttaggacagaacgtatgtgatggcgcacttagcttttaacattcaatcatctgaaagtgcagcaagtcaaagcagatgccgtaagcttggcaagtagactcgaagccctagaaaagaccaaacggtgagcaatcatgtatttcactaaagattaatgacattcctcagagcagaacggccatcaattcaccgccttgacatgagttgcagaatgtttctgggtgaaaatttagaagaatgctccattgaagaactgcataatctggaggttaaactggcgaagagccttcacgtcatcagagggaagaaggtaagtaaatgccacagttgtcacataaaccctagtctctaaaatttctgcgtattacgataacaaagaaactgttcgcccaagttgatatgcacgtcctaccttttgttttcacagacacaactgctggagcagcagatatccaagctgaaggagaaggtaagataacgcatagagcccagaccccagagtatcctgaaactcttagtgaccaattcctgacctctgctgttccttgtacaacttgcaggagaggaccctgctccaagacaacaaagagttgcgggataaggtaaatcaaacgaacacaacattgaaaaccgcagagaaggcatgtagggtttttttaataacattgcaaactgtaaattaaactcttaacgttaacatgatatgcgcaagaaagacagtctcacagccatcatgtgtggttttctaaaacttaacgtgctgcctgttctgttcttgtggcttcagcagcgcaacctccagtctccaccggaggcgccaccggacctgaaccgctgtgtccctccttggccgcgtagcctgccggcaccgagcaatgacatggacgtggagacggagctgtacataggattacccggcagggagcgctcctccaaccgggactctgattga

SEQ ID NO: 137 - DNA, 7046 bp, Zea mays
ttttggaccctaggaaatctgtatgaaaaatataggaatttggttcctataggaatcagcactgcaatgccctttggttggcaggtttgagactttgaggcgtgggaaaattggagggtaaaaatcctttggaagcatttcacggaagaaacatgggaaagaaaacatgcactctgatctcatttttctagcatgcgcatagaatgaagataaaggacaagtcaaagactacagagacagagagaggaagtatagcactggcccacatgtgtaattaagtagcttgataaagaatctcgtagggatttttacaaacactgttatggactcgtcccttacgtgtttcctacaatcatccgaacacaattcaacaaatgttcctatatttttatttgtctgttttgcacatacatctatgttatatccctgtgttttccctgttcctgcaatttttttctttcaaaggaggactaagcaaagacctccttccgtgcttggcctttcccgggagcgtgacgctgccggggccgttttcgcgaaagcaggacgcacacaaacacacaaacaaccaagcaacaatggcaaacgagcgagcgcggaggaaaagccaccttttcttcgagttctacctctagctggtcccgacgcccgagggccgacggcgagagcagaccgggcctcctccctgtgcggaaacagttcagtcctgctcggctcggcacaccaccaacggttacgcgcctacagacgccgtgccgcggcgcccgaggacaaggaaccccaccaaaaccacccgccgaaaccgagccaaaagctctgtggtcccctcgtccacggccaccgaccccaccatccataaactcgccacggccactgccgcagcggtccggtcaggaggggcgggaacaggaaccgcggcccgcacgcatcgaagccgctgcggtctgcgctctgcggtggtgggctctggctctgcctctggctctggcgcaggggcgtgggggacgggactggcattgccactgcccagccgcgggagcggcccctccggggggacaagcgcattaatgccactgccgcctccgccgatttaactccccgcctctatcgccctcaccttcacctgtacgccgtcccgcttcgcttcggagaggtcgctgcctgtgcctgccatcaacgttccctcgctggttgaggtagacccaccgacccccagtactagtcgggacagagatggggattgatctcaacgccgtgggggaggacgacccggcgggcgcggtgtgcgcggagctgtggcacgcgtgcgcgggggctggagtggcgctgccgcggcggggcagcgccgtggtgtacctgcctcaggcgcacctcgcggcgggcggctgcgacggtggtggggtgtcggcgccggccccgccgcgcgtgccgccgcacgtggtgtgtcgcgtcgtcgacgtcgagctacgcgtgagttggcctgcccccccccccccccccaccttgcatcgtgcagcccagctggtgatttagttttgcttgctttcctattcttacgccagtgcgtgtgcgtgcgcgtgcaggcggatgcggccacggacgaggtgtacgcgcggcttgcgctggtggcgatggatacggtgagtgtcgttgcttcggaaaagttcgttgctcgcggtggggggtgggggggcgctgtgatttcagccaaatcgtttcactgatttctaccgcggatgttggatatggtatctgttccattgacttcattccctgtttcgtctgcagtttgcattttgccagagcgttgggggcttggggctagatatgactcgtcactagagtatatttttggtattcaaacgcaatgtggaggacctgccattgccaacttcgagttgttcgaaatgattggcttgggagtacagtgtcacatcgatttagggggtgtttggttttagagactaatttttagtccctccaatttattccactttagtcactaaattgtcaaatatagaaactaaaatagagttatagtttccatattttgtaatttatagactaaaatggaataaaatggagggactaaaaattagtccctagtaaccgaacactaccttagactaggaatcgttttggattcagatatcactatttaccactttttagttcgaagtccaatacaaatattgtcgcatactaatgcaacaccaaatatctcaaatcgaatctacactaaaacagatacagatatggatcattgaatatctggacatcggcgcatcgatatctaattagtactagtactttgttagaggcttgggcatcgttaaccacagtaccttcttgtccttgcttgttagtcttttcctgttttccttcttaatgcttggttaaactctctgaataattcgatcagtcacagactaagtacgaaatcattcattggttactgtagactgtagtgatagcccctttttttcatttatcatggtactttgctagaccttattttttttgaaggcattgcttcgtccttggtgttcgtactagttgctcactggtattgtactactaggagaatcgatcatagtttattttggcatctcattgtagcgggcaatgaatggaataggaatctcgcatgctgcgtggttggaaacaagattttttctctctctcccgtaggtctctaaaaacattgtttatttggacccagatgtttggccgaaacatcaatgatggtgaaactgaagagaagaatggcgaggaagaggatggcgacggagaaaagaagcacgcatcacacatgttctgcaagacactcacagcttctgataccagcacacatgggggattctctgttccacggcgagctgcagaggactgctttccaccattggtgatacacatggaacagactttagtttgctcctaatcctagattaggttgaagtgctgctctaaccagttcctgtttcatctttttcttctaggactatgagcagcttaggccttcccaagagcttattgccaaggatttgcatggcatgaaatggaggttccgtcatatctatagaggtaccaacacatggtctggtattttggagtactcctagattgaagatctaatttgcatcagaatttataattgttaatgcaacatctatatagtgtatgcttcttcatggttcacatgggaagtgaatgtgcactattttcccccaaggaacgtaatgttatgcttggtaaatgctatgtgcaagaactagtggatgaaactgggtcagcaacagtaattcaggatgaagtatgtttattgttggactaaaaagacttaatgtgtttcagtttctaaagcaagagttcatttactgtggtaagtatttgattggatagatactttagatcactgtaggagtctttcctgttgttttgatttggagaaaggaactgttgggtcagtaaagtaagaaaggagttgtgtcagttaagtaagaagtgaaatttgggaagtgtattaattagtaagtggaagttactgccaatttattaagcagggaatatgttgatggctcacacggaagcatttttggccttcctttctgatgacgtgctaaatttcataattgttccacatggtcttgtaatctgtcgatgcttgtcagaacttggggcaaaatgacaaggcccaaagagtgaatagcgcttaagtttgctagattaaaggtaaaacttttttctcgaagttcaggtcaacctcgaaggcatcttctgacaactggatggagttcatttatcaataagaagaaactagtctcaggggatgcagtcttgtttcttaggtaagcatgttgtcaatatgctacacttactaacttgtgttggtttccacttctcattgcgtccattcttttgacatacagaggtaatgatggtgagctaagattgggtgtgaggagagcagttcaactgaaaaatgaagctctacttgaagctgtcaactgtactgattcgaagctacttatgctgtctgctgtggccaattctttggacaacagaagtatatttcacatctgtttcaacccaaggtctgtttactggtgcacagtatgttcattagattcaagttagtcacagttaagtgcacatgggtagatacagccatacagctctttgcaagttcataattcttgagtttctgtaatcttttttcatttacccacagaaatttattgtgaagcacagttaagtggccttcaaaatttggatctctgcacctccaaggtcatctagtgatgcctgacatgctttgaattaatattttattttttatttttgaatgcacatttgtctgtactgcttaactcatgcgcatttgtaaatttcaaggaacatgcaacctccaaaaaccaatgtctacttcgaatattggtatagtttcgcttaactaatttcagtgttttgtctttaaacagggttggtgcatcagaatttattgtgccgtattgcaagttcttgaagagcttgaactatcacttttcagttggaaccagatttaaagttggctgcgagaatgaagatgctaacgagaggtctacattcttttaacttcgggaatcacttttccatgcacaaaagtatcctgaattgtcttctatttttgtaggtcctttggattgatcataggtattagtgaagttgatcccatacactggcctggatcaaaatggaaatctctcctggtatgcattttaagggctagtttggtaaccccattatcccaagggtttttcattttcccaagggaaattagttcattttctcttgggaaaataggaatcccttgggaaaatagagttcccaaactagccctaaacgacctgtttttcctagccaaagagccatagccagattttcctctcgttcttaattgtggtgtactatggtaccttctaataagtcatatttgacccactgaattttatccgactagcttgcaatgtacctcaacaagttggtaatggtcttccactttgctgttttttttttgggtggaagtaggatcaccattaaggttaaacctaagctagctatatatatgtcggggaggaaaagtgtaacgtagagaggtttgtgtacccaaatttaatatggtgcacaactatgcatgcagcgattgttttatagccccatctcgtccttggctgctttgttttgtagaaaaccccttgatatcatgcaccgctagatctgattttaaaggcaggagtttatatgtgcactgtgcactggatatcatcccatgcataaatatgatgtgatgaaggtgtaaaacactcttagcgctttttataatctaaccacctgcacagtaggaatagaaatgaatcttgtgtttaactgagtgagtacttatttagtcttaaggctatccccaacaatgtccggtatgtgctcctctccgctagatttagagatcgatggtgttctgtacacgtccaacaatatcctgtaaatgagtctctaaattttgccgcacgccgatcaccctctaaatatgggcaacctggcgcatcctctacaaacgtgcatcctctacaaacgtacgatcgagcagtatcactactattttatacttgttgtgccgtttcaggtggttgaaaatgattttttgactgtacaacaccagttctgtaggtactactgtagatatagaggaccaaatttaggggttattgctggagatgaagaaaatatagagaacataattttttagaggatactataaaggacagagaatattcttttagaggacgaaatttaggggttgttgctggagacagtcttaatgtatggcatgtgggggtacttgactttcctcaaactggaatttctcatctgtctgcatgatttacagataaagtgggatggtgctactaagtacagccaccagaatagagtatctccatgggacatcgagggagttggcagctcagtttcagttactcaccgactttcctcttctgtttcgaagcgaacaaaactgtgcttccctccaagcgatttggacacgccaattctaggtaggttacacagcatgaaattgatacagattcatagctaagaggcccctttaatcaggtccatttataactatttgcatgaaatatgtagatggaaacggtcgtccagactcagtggaaactgaacgtttccacagggtcttgcaaggtcaagaattggtgcactctagtattcatggtactgcatgctctcattcatcagatagccccagatgtcaaggctcttatggcaggagattctctgctgatgcgtggaactgcaagatgaatgatgtaatgagtgggcctcgacacctaaatgccactgggtttgcttaccagcccctaggcttcagtgaatctgtcaaattctcagaggtcttgcaaggtcaagaaatgtctcaggcggttccttccttcatgagatctgctttcaactctggcacgcagaatggcagggttcgaccatttgattatgtgcagagatcagatgcaactcaaggatacgctctccagcagtttaatctgccagcaacagaagtgcattcgccctcttctgttcttatgtttaaccaaaccatggtaccacatgctgagctagatggtgcgaccaaccgtgaagaagtacatggcagcaggtacttgtcatccaatgcaatagggagagaagctgaaccatggccatccatgcagcagcaaagagcgagtgtaaatggaagcgagcctctcgacacaactgaagcctcagctcctgcaaggaacgctgaatctggatcggtcggcaggggcgcggggcgaagcaactgtaagctttttggtttctccctgactgagaagatccttggaacggatggtggtggtgtgaaagaagggaactacgaagtggaccgtcaaactccccgggtgctagacttgtttgggcacggttctacgcctggagctctgcatgctctctgtgctgctcccttgggaatatga

SEQ ID NO: 138 - DNA, 2852 bp, Zea mays
tcgcggacggtccgcgcataggtgtttgttttccaaaaaaagcttctcctgtccggaataatctacggtattccggacaatcgatttagaatagttgtagatgaacttatgcacctgataaatgatcaactaggcaaactagttagtccataaggtttgtgatggttgtcaaacaccaaaatcgattataggaaatgttgatgtcatttccctttcagcggcaccgctccctacaacgctacactccaggtacggacactttaggcaagggtaagactaggaggcacgacactttaggcaagggtaagactaggaggcattgatgtactatctttttcttccatggactctcttgtatggattgtatcgactttttatagacttgtatgacctctatagatttttatgatcttgtatggaattgtatgaacttatatggacttatataaaacaagctctatagtcttgtatatgttggcgcagacattagtgttgtttatcttggcgccgacctctatagtctagtattaagcacaattattattggcgtcgatcgccgtagtatagtataaaacatacataggtatccgcccatgttagacgccaatactattgatgtcgatctaaaggttcatttttaaaatgaaactagaaataatatatttgtaaaaataaaacacaaaaaagaactaaattgcaaaaaaatttggacgagtgagctcgctgtctggggcttgcgtcgtcgacgcggctgccaaggtagggccgtggccgggcgctctagaattcccgcacgtttctctcctggcgtttacacgaagtcacgcagaggaggtcaggaggagaccaggggagccgtgcgcgtgcgcgtcagcgtcgtcgggtgcaattcgcgcacgtttccctcctggtcgtttacacggagttaattagtgcccgcgtccgcgttaggtgtggggccctacttgtaaggctcacatgccggagcctataaaacagctcgagtgagagaccagtgagtgaactcatcactcccgcttccagcttcccgcagcgagcatcaaaaggagaagagcgagagagagcagcaggcatggaaatgggcgacagcttcgagtactactgggagatgcagcagtacctggagtcagaggagctcaggtatgccacgccggacgccaccgctatcatcggatttggcagggagtcgtctgattcgattgttcggaatttgccgtcgctgcagcctctacatgggcacccaggacgatgccctgtcctgctacgactccagctcgccggatggctccatctccaactcgtcctgggcgccggcgggcgtggcggccacggcgtccgagaagcgggagggccccggcggcgcggcggccgcgaacaagaacatcctcatggagcgcgaccgccggcgcaagctcaacgagaagctctacgcgctgcgcagcgtcgtgcccaacatcacaaaggtgagagcccaggtccagtccgtccgtccgtcggcattgcatcgcattgccagagggatcgacggcaggtgaggtcgtccaatccaaccaaatccagtgagaagccatcttgttctgattctgacggcggagacatcgcaaccgcgtcgcagatggacaaggcgtcgatcatcaaggacgcgatcgagtacatcgagcagctacaggcggaggagcggcgggcgctgcaggcgctcgaggccggcgagggggcgcgctgcggcggccacgggcacggcgaggaggcgcgcgtggtcctgcagcagcccgccgccgccccggcgcccgtggaggtcctggagctgcgcgtgtcggaggtgggcgaccgcgtgctggtggtgaacgtgacgtgcagcaagggccgcgacgccatggcccgcgtgtgccgcgccgtcgaggagctccggctccgcgtcatcaccgccagcgtcacctccgtcgccggctgcctcatgcacaccatcttcgtcgaggtacgtcgtcggcaggcaagcactagcagcagcatatatgttcgcattgtgcattgtttgcgaagcaagcacagagtgctctgctttttcttgtcaagttttcgaatgcttaggaatttaggggatgttggttttgaccgtatagtttgacattttttctcctgttcttttctttattagggcttattaagactaatttagaaactttaaaagggatttacatatttctaagagaaattagtttattttttctgggtaagattagaatctactggaagaacagtgttctcaaactagaccttagataaaaaaaaagtggagtgaataaaagatcctgtgtttcataacgaacggcacgaattgaaaagggcagcgacgagtttcctgtactgcacgacgccatggctgccctgcccctcacatgtcgatagcacgtggaaaacgatgggcacgtgttcgagccacccgcaagtcgcgccgtggctgtttccatcatgcatgaattattagtactagcactagcaggaacacaacaaatctattttccacatgcttgatagcgactggtccgagtcctacgccgtcgccgggcacaaactgcacgtgctcggctatctcgcatatgattagtgtgtgtgggttggatcggatgcgagtgactgattggcatttttagcatcgataatattttactatttttggatgaaaaaaaagagacttacaatcctgtggttttctttgccaggtggattcggaccagacgaatcgtatccagatcaagcacatgatcgaggccgctctcgcccagctagatgatgcctccgcgagcccgccgagcgtgatgagctactattag

SEQ ID NO: 139 - DNA, 8185 bp, Zea mays
ttccttgggtttccacccaattacgggttggtttgggatctgttgacgccttccgcgctcaatttggtgctcaacaggatcaatattgttattggatgggttgggtttaactttcttatagtatttttggttgggtgtgggatggatatcaaagtaattagatttgggtatgggtgggagtggattggactttttgccattagcaggcctagatgcgaggcgtggagtttacgtgccgccgtgcgcgcatccggggcgatcggcgcggcgtgccacgtgcggtgaattcgcccggaagcgagcggtcggcggaggggacgcattgcgtacggtggatccatacccatcgtcttcctgctgctggtctttattttttgcgcggtgaaagggtggggggttcggaggagcagatagcttggtagccgctttttttttcaccgagcgaggaggctcatgcttccggcggtcggtttcagcggatccgttttaccgacaccacgggtcgaaaagatggaaagcgaaaggccagcgggctagccggctagaggcgccgcagcgacagcgagagagagggaaaaaaactaaagctgagccgcgaactaggaaaaggcacgatgaggagctgccgtggacgtggctcctcgacgactctagttatattcgttaccgcaaacgttgtacggccagtaacgaacttttgttgttgcagtgcccacatctcggtcggtcgctcctgtgaaaaaaggtaggggcacgccacgatccagatcgtttctcctgttaacttatctacacacagcctgaagctttgatggagccatgaaaggggaggctcgcagccatgaatggggcaggagtggccaggcccgaatctggagcacatgcgtggcccggtggccgtctccatccacgggatgcccgcaattcccggcctcattgtcatgtgcctccccagtccccacctctccaaaccgtcacgtgacccatagtccgcagtccacgtcgccgcccaccccctcccctcaaatctgaaatccaatcgactcattaaccccggagctcggcagagagagagcatcggcacggcgcggtggttgattaaccagaaccagaagccagcacgtgcgcgccggggctggtccgccgcctgggtctgcgtacatatgcgtctgtctgagcgggcgccgcgaaggaaactgacggggggctttgcttggcgtataaagcgtctcgcgagcgcctaccggcagccatagctggtgagtagtagtagtatactggaggaggaggaggaggaggagagggagaagacgaagcgaagccagggcaaggtcgtcggagccggagagggaggaaggtggagaacctctacctgcgtcacgtgacaactgtctcctgacccacaggagcggcggactccctctgctcgccgcgcgcggcctgttccggttcggtcggcggccgacggccggcggcggaggcagcaggaagctactgtaccaaccggcccaagagaattgcgggtccagaggcagtgatggcggggcgctacgattgacgtgctacgattatgggcatccaaggtacgtacaggagcacgcgcgcatgggcatgtatggcctgtcgatcttgtgtgctgctgcgtggctttcgttcgagtcattggcggacacaggggaaattaacctccgccgcgcgcagggaacaaggcggcgacgcacgagcacgacttcctctcgctgtacgccgccgccgccgccaaggacgctcctctcctgctacacgactccaaggcgccgcctccttctcaaggtccgcacgcacacactgcagccttcattctcccttcctctcacgccaattctactccctctcgttggacctccgcgcaagcaatataacatctgcctgttgcaattccttgtttcctgcctggatcaaaccggggaagaaaaccttgcaagccagcttgtagtaaatgactaattaattaaccaatcaaattagcatgttcctcgcactgacgcgtgatgattggggttcatttaactagtagtatgtaataaagtacagcaccctataaatttcgtgcaatttaagctggacggcgataagaagcgacaaccaaaagcaacggcggatcacgtgtgcgtcggacgcaaggagccgtcgacgggcggccttccgtcccatctgtccgggcccacccaccccgccccgacccgacccacgggctggctggctttattcatgcttaagccgcatggaaatgtttttatacgaacaatcgcgtgttgattttcattcgttcttcttacggctattttttgttttgtaagggaaagtttcttatcactggctaccgccgataataaaagttactgcgtatgtatatatatacaggtaatttcctcttgaagacgcacgacttcctgcagccgttggatcagaagccgggagcgccgccggagccgtcgccgctgcccgcttccgccgcggagagcaggcaccagccgcagcagcaggtcgtcgtcgcgaaccagcacgcgctgcccctgcccggcggcgtcggcaccttcagcatcagccccgcgcccgtgtccgtcgcgctgccggcggccgtcgtcaagtcggagccgccgttcgtgctctggggccagcctgccgcgacgctccatccgggcgcgcgaggtacttgtccatcgtagagatttttctttctcaaattgttatttaaagggttatttacataaaaatagtaccaaaatatctaccccgaagaataggaaaaggatatatagggcctgttaagttgcttacaccgtttcgtctatagcgacatagcgaatgcacacgccacacaaacacggcgccgcggtcgcactgtcgcatgggttactcgtgctctggggacgtggggtttgccgtttgcgtgcctgtctcaagtctcaacagtgcatggagagctagagcgagactctactcgtacgtccctactctacagagagtggggtggcccgtgcatgtacaccttcaagcagaccgggcccatttggggcccatgttggccgtgcaccttcagcctcgtgtcgtgtcacgtcccgtcctctgtctcgctcgcaagacccaccccacccacgtgacctccaggtgcttgcccgccgggcccggcccacttaatggccgagccgccggctacatccacgccggacgctagctgccaccggcccaaccactcaccgacatgtggggccgaacggcttccgcctggcgcctgcgccattcttcgataactgtttgcgaaataaaaaaaaaatagtagcaaaagctaaaggcgggcgcttttgtgtgtttcttgtgttgtgggtctctccaccaccaccagcagggcaccagcagcagtgggcgctccccttcgccggcgccgggcaggtcaggctgccgccgcagcaggcgcctccggatagaaagggccggggcggcgccggtggcggcgtcatggagtctggctccagatccagcggcggggcggggttcgacgacgacgacggcctcacgacgcgccgcgaggtctcctcttcgctccaaggtacctcaattccgctgaatctatgcgaaattcctcctcgtgttgctctcgactccagcgacgatacaaacctcggttttttatctagatatttgacggtttccgcccattcctttttcaatttttttaaagacgccccgtccttgttctcatcgggggtagtgttccgtgttcgtgtagcagagttaacggtgaggaagaggatgactggtgtggaagggatgagtccgcacgcgctggtggcgacgggcgctggctggcagtggcagccggcacacgtccaccggctgcatgcgcacctcctcgtctccggccgcctcagcggctcgcctacccttgccgcccttacgctgctgcgcgtcgcctgccgtgtcccagcgtccccttgcctccgcccgctcgcccaccatctgctcgaccgaattccccacctgtccccgcacctcctccacgccgcagcgcgcctcgcctcccgcctccgcctgccttccctcgcgctgcgccactaccttgctctacgtgcgcgccatccggccttcctcccgcccgcccctgccatcgccgacgtgctgaagtccgcccctggccgggcagcacatgcccacgcgttgcgagttgccgcacacgcagtggatgctcgtttccttgacaacacgctcatctccatgtactttgcctgtggcgacggctggagcgcacgccaagtattcgagggaatgtctgaccgggatgttgtcacatggacttcgctaatatcgggacttgtgcagaacggctgccccttacaagggcttcgccattttgcatcaatgatgcacagtgaggtgtgccctgactttgtgttgctcatatccgtcctcaaagcctatatggagctcgatgactttcctggtgccacagcagcccatgccttagtggtcaagagtggctttgacaatgaactagatgtgataattactctgacagccatgtatgctaagtttgggtgcatcgtgtctgctaggacactctttgacagggtgccaaccccacgggtgaatgtggtcctttggaacgccatgatatcaggttattctaagaatggacttgccaatgaagccgtgcaacttttcaagcagacgaggaaggttgcaaggagcatgacccctgactctgtcactttgcgatcggtgatcgtggcttgtgctcagcttggatccgtagaacttgcagaatggatggattgctatgtccaaggcagcaagtacagggatgatgtgcttgttaacacagcgctcatcgacatgtattccaaggcagggagcatcgcccgtgcacatacagtctttgaacgtatggacgtgcaggagcgggatgtggtcgtttggagtgctttgattggtggttacggggtgcatggtcatgtcaaggaggctgttgccctgttcgatgacatgaagcatgctggggtgaaaccgaatgatgtgacattcctgggcctcctgtcagcttgcaaccatgccggtgctgtggatgaagggtggagctacttccattcaatgaaacgtgactatggaattgagccccggcaccagcattatgcctgcatagtggacctgcttgctcgtgctggtcatcttgatagggcttaccggtttataatggacatgcccatcaagccagaaatgagtgtgtggggtgcgttgcttcatggttgcaggatgcatgggcgctcagacatggcgttggctgagtgcgctgcgcagcatatttttgagctggagcattccaacgcagggcattatgtgcagcttgcaaacctgtatgcatctgccgggatgtggagccatgttgctggtgtcagggtgtccatgagagagaggggcattagcaaggcaacagggtggagctccattgatattaatggagagatgcactccttccatgcaggggatcattcacatcctagggctgctgagatttttgccttgcttaatcttctttctccaactccatttgagagtggaggcggataagaattttttgaatgctcttttcttccatcattcttgctgagggagcatatgtaatgttttaatttaacatgaggcaaactaggtcatatcccataattctttcctttggtgtcccagcctcataatggattctcgtgtatccctccttgccataacacaaccatggtagggcactcatatcatcaaatgagcatggtatactatggaaattttgcttcacaaaaagttgtgcactttaatttaattggagtaagaaggggctcacatgtcattctctgcaatgttttgtactaacggatagtgtttgtgtcaacagatttgacagtaagggtggaccggaagggtgggagctgcagcgatggtggtacggatcagcggccaaacacaccgcggtcaaaacactcggccacagagcagcgcagacgcagcaagatcaatgataggtgccttgatgcagtaatttaatgaccaattataaggcctcaaataagttgacctctatggactgtgtttttatattactccacatcattcctacaggtttcagatacttagggagctgttgccacacagtgatcaaaagagagacaaagcaacatttctcttggaggtaaggtttcaacaggtttcctgttttatcgaagaaaattttctcaattgattaacacatgattccttcgtgccatcctttcttatgcaggttattgaatatatacggtttttgcaagagaaggtgcaaaaatatgaggcaacatttccagaatggaaccaagaaaatgcaaagatgcttccatgggtaattgcttctttctccagagctccaatgcttgctagttgctactgctgtcagggaaggaacagccaattcttgattgtctgtgtctgaatgtagttatacatttttgcagtcaaatatgtattttcgatcattctggaaaaatgcacaggcaagtgtttgttgctaacaatgcatttgccttactgaatcattaatgatgtatcaataatttccgaccaacatcttatgcattcttgttatccttgtgctgcagagtaaaggccaaatctcaggagattccccgcctgacccttcacatttcatgagaaatggatcctcccctggatctaatttcactgggaaacttgatgataatcacaacatagtgacatctgcagctgcatcaggggcacaggatcaggtagaaaccgaccacatggctagcggatgctacagatcagcagaaactacggcgaattttacaagtatgatcgatggtccacatgattttagcaatattctcagaagtgcttgaaactagaagcgccactggttacttatgagtcttctttatatgcagataatgctatgtctcagtcccaacctcaatggactggtccgtcccctgtggatgactctgcagtgaacagtgagacgcttaacaaccagcagttggtgattgatgaaggaacaatcagagtgtccagtaactattcccaagagtaagtcgcaaagaatatgagttatattttgctcattccgttcaaaaatgcttgccacatttgattatgcatagtcattggtgcatatctttgagtacaaaatttttcttggcaacatgttcttagccttaatccttaaaatttatgatattttgctagtatttgtcaatacaattatacacatataacttgcatattttcaaactaatcgatttaaaagtttgatttttttaaggtttgactaaatcttgtcctaaacaacataacccaacagactactacttttctctcataagctctcattcttattgttaagtcttttttttcctgtttagtgggtccaccattaggttttcccaccataaatttcttgctatttctctttgtaccttggttctttcagaatattagctcagaaagcactttgtgtttgggcatgggcagctaatgatttgttatcttcgccgaagataaatgtatgttgatacatcttttcttttatttgggacaggttgcttaactcgttgactcatgcccttcaaagctcaggtgtagatttgtcccaagccaacatctctgtgcagatcaacatgggaaagcgtgccgccaagagacccgctgctggtgtatccagcaactccaaggtacagtaccccgaccatatgaacaggtgttcatttagaagatagcattccagcaagacgactcattttaggtttgagatgggaaatacgcaacggccttttcacaattaaaaaatgggcatggtttttttacgatggaaatatgtgcctgcttagtacttgatatatgcatataacttgtgagtctttagcagtgttctgtacaagcggtggaagctctgaaatatcatctcacaggcatctggaagctctgaacattttgcatctgcatcattcgtccacgctgatttatgattttgacatgggacttgaatccggcgcaggaaccagctgatccggcatctagcaacgaattagggcatcagttgacgctgtcgggtgccggtgccgactgcctctctcacgcaacaaagcggcataaacggagcaacagctga

SEQ ID NO: 140 - DNA, 2574 bp, Zea mays
aatagctcttttggttactaaagcactgattatggtatgcccataggttaggttgcaggatcaaataccaaggtatattattttgttttttgcaatatcagttttctataaatttttacggtgtacataaaacatttgcgtaaatttatacagtatgtataattacaatagtaattttctacagtagttatacttacaatactgtatggattaccttgcaacatatataaatcatggctatggtggcaacaaatctaatcacttaatggtttaattgcaacatacaataactacaccgatgatatttgcaacacataataagtgttgctctatgctcgttagcaacacataacacttgcaacacataatatgtgttgctttgtgctcctaagcaacacataacacttgcaacatataataagtgttgttatatgcttccttgcaacatataaaaccatgcgttactagacatgcgtagctacagagttgttctgttgtagtgaaaatatgtgttatatattaacataagttataaaaggttatcaaactagaatagatctactggtttttttagattctatggaagcgcacggctcgcacatgcctagacacggctatgttgcgtactatgctaatatcccccgttttgggaagtggatcgagcaccaaaccaggttcaatgcatgtgtgttgctttgctccgatccaacagatagaaacagcagctgcagacatatactagtatttgtcaaaccccgggtctgaaatgaatcaggacgccgctatccccaaacgcattagcatgcaatgcaaggctagatagaggccagcccagctgctcggtcggtcgtccaaccatagccgagagtcctgcgtgcgagcaccacagcaaccttcggggaagcacgcggacagatggccacggcggaaaaaggaagcaggccccgctcgacagccatccggagcctcgcagtccggccggcatccgtagctggcgtcacccacacagcgcgagcgagggcgagggcgaggccccccagtcaacagaaagggagaaacaattagcaccaacaatcacctgtccgcgcgggctaatgacagccctcagcccaaccacgccaagggaagcatgccgatgacagcgacggcggcatctcgctgtctccctggggaagaagataagacgaagcagcagcagagaggggggagagagaggcggagagctaagcgaagctacggctttatccggctagcttatagcttgagttaggtgggcgtctgtctcgttcgtgcgctttgcctcccagcaggcaccagctcagcgcaagccatacacacacatgcaaatgcatcccccgctcggatttacgcgtctgccgcctcagctcctccgcatcgtcccgccgcgcctccacctctgcaaccgcggcgtctgtctctgtgtgcttgctagctcgtccgtccctgccgagagagagagagagagagggatctctatctcttttcaccatggcggcccgcacgcttcgttcccgcttctttaccaacccttatataccccccgcacccccctctcgtccatgtcatcacacctatagcttgcttcctcttgctgcacctgcgcgagctgagctgcaaacgcacacaaatctagacgcaaaacactggagggatatacctgcggcgtgcgcaccatagacgataggtaggtgcaccactgcagccaaatttggcacatgtcagtagcagtaggtgcccaaatagattatgggcgtgcgcgtgccctaacggttcatggctgagcagcagccgccccattctccttacccggcggtgcaagtgcaacgaccgggaccgccagcaggccacagccgccaggctggttcggcttcagcctcgcctcattctccttctccagtggtgcagggcgactactacgggacggcggcggcggccgcgacgagctcgggggagccgtcgccgcggtcgtccgggaagcacgcattctaccgcggcatacggtgcaggagcggcaagtgggtgtcggagatccgggagccccgcaaggcgcgccgcatatggctcggcacgtacccgacgcccgagatggccgcggccgcctacgacgtggcggcgcgcgcgctgcgcggcgcagacgccgtgctcaacttccccggcgcgatcgcctcgcgcgcggccccggcgtccgcgtcccccgctgacatacgcgccgcggccgccgccgccgcgcaggcgcagctcgagtactcgcagtcgcagggtgccgccagtaatcctcttgccgccgccgctgcacagggccggcatcagcagcagcaccacggggcgagcagtacggcgacagctgacgcggcgggctacaccgcgccgcagcaggagatgggcactgacgagttcatggacgaagaggccatcttcgagatgccgcagctcctgcggaacatggcggccgggatgatgatgagcccgccgaggctcagccccgacacctccgacgagtcgcccgacccgtccgaggccggggagagcctctggagctaccatgacccgtag

SEQ ID NO: 141 - DNA, 303 bp, Glycine max
atggcgtcaagctctctcagcaaacaaaaggcttctgactcctcttggacaccaaaacagaacaagctgtttgaaaaagcacttgcaaaatatgacaaggatacccctgaccgatggcagaatgtagccaaagcagtaggtggaaaatctgcagatgaagttaagagacactatgaaatcctcttggaggatctgagacacattgagtctggtcatgttcctcttcccaagtacaagtccacaggaagcagcaccaatgttgaggaagaagagaggcttctgaagtatcttaaactgaattga

SEQ ID NO: 142 - DNA, 303 bp, Glycine max
atggcctcaagctctctcagcaaacaaaaggcttctgactcctcttggacgccaaaacagaacaagctgtttgaaaaagcacttgcaaaatatgacaaggatacccctgagcgctggcagaatgtagccaaagcagtaggtggaaaatctgcagatgaagttaagagacactatgaaatcctcttggaggatctcagacacatagagtctggccgtgttcctcttcccaagtacaagtccacaggaagcagcaccaatgttgatgaagaagagaggcttctgaagtatcttaaactgaattga

SEQ ID NO: 143 - DNA, 297 bp, Glycine max
atggcctcaagctcagcttggacaacaaagcagaacaaaaagtttgagaatgctttggccatctacgacagggatacccccgatcggtggcagaacttggccagggcggtgggaggtaagactgtggaggaagtgaaaaggcactatgagatgctcgttgatgatttgaagcagattgaagaaggtcacgtgcccttgcccaattacagaaatgctgctgcaacaggaggaggcagcatcagaggttatagttacatggatgaagaacaaaggatgaaggttctaagcctccactga

SEQ ID NO: 144 - DNA, 1254 bp, Glycine max
atggatagggtattctcagtggacgatatctccgatcatttctggccgccgcctccgatccccgtctccggcgccaacacctcctctcagatgagccgcagcgcctccgagtgggcctttcagcgcttcatccaggaagcttccgcctccgcaccctctcctccgtcttcttcctcccccgccgacgtcgtattcgtggagatcgatgatcagcccaaacccacccctccgcctccgtcacacggcggcgttctgcccagtgaccctggtcccgtggcccttgactccgaggaataccaggcctttctcaagagcaagctcaacctcgcatgcgccgccgtcgccatgactaggggatctttggctaaatctcaagacccgtcccctttttctgatggtggatcacagccgactaatccttctctagttggatctcagactacttctaaaggatctattccttctggaaatgatcaatctaagttacaagataaagatatcaatgcaccagttgggattccttccatacctgccatacaaaagaaacctgctgttgcaattaggccatctacaagtggatcatcaagagaacagtcagatgatgaggacattgagggagagacatctatgaatgacaacacagaccctgctgatgtaaaacgagtaaggaggatgctatccaatagggagtcagcccgtcgctctagaagaagaaagcaggctcatttaactgacctagaaacacaggtttctcaattaagaggtgaaaattctaccttgttaaagcgccttactgatgttagtcagaaatacagcgactctgctgttgacaacagagttttaaaagctgatgttgaaacattaagagcaaaggtgaagatggctgaagagaccgtcaaaagaattactgggttgaacccaatgcctcatgccatgtctgatatatcatcattgggcctgccatcatttgatggaagaagcccttcagacacttcagctgatgcatctgttcctgtgcaagatgatccacatcatcacttctatcaacccacattgaataatcctattcccagtcatgatccgatagtcaacaatggtttggggggcatttcttcaattgaaaatgtgcagcagcagaacgctgcagcagtggtaggtgggaacaagataggtcaaacagcatccctgcagcgggtggctagcttggaacatcttcagaagcggattcgtggtggacctccatctgagcagtaa

SEQ ID NO: 145 - DNA, 1029 bp, Glycine max
atggagctgagtttggatttgagtttaggctttgttcccaaacctctttccctgtttttcgccgacgtttctgcgaacagagacaaagtggccacactcgatggcttcgtgcagagattggaggaagaattgaaaaaggtcgaggctttcaaacgtgagcttcctctctgcattcttctcctaaacgatgctatagctagattgaaggaggaaaaagtgaagtgttcgggaatgcaagatccgccactgaaaaccagttctggaggaaacaaaaatgaaagctctgagaagatgaattggatgagttcagcgcagctttggagcactcagaaaaccaaatcgagaaatgaggaagatgataggtctgtgccagcgaacccaattaatgggaattcgtgtgtcctcgagaaggagggttcccaagttccgaggtttggtttgatggctcgtgcttctgaactgagtcatagcaattccaagagtgttggtggagatattagttctggctcctctttgctccgtgttgaggtacagagtcagccacaaccgccgcaacatatgcaacagaatccgaggaaacaacgccgctgctggtcgccggagcttcaccgccgctttgtggacgctcttcaacaacttggtggagcacaagtggccactcctaaacagattagagaactgatgcaggtggaaggccttacaaatgatgaagtgaaaagccatttgcaaaagtacaggcttcacgttaggagatttccagtttcttcaactggccaggctgataatgggtcatggatgtcacaagatgaatctggggataaatcaaagggaaacaacatgtcacagtctggttctccacaaggtcctctcacacctctgatcctaggaggaggaggaggaggatctgctaagggtctctcaagccctggacagaacagtgtggatggagaagatgagcaatctgattgccggaattggaaaggagggctccaccaccaccagcttgaagctgataatcaatgcctctaa

SEQ ID NO: 146 - DNA, 1098 bp, Glycine max
atgggaattgaaagaggaggcttgaagggattcaggagcggctggagtgtgccgccgaagaagccatgcgactcctgtaagctggcttcggcggcgcttttctgccacctcgattccgcgtttctctgcatcgcgtgcgattccaagattcactgcgcgaataaactcgcgtcgcgccacgagcgcgtgtggatgtgtgaggtgtgcgagcaggcacccgcttctgtcacgtgcaaggctgacgcggccgccctttgcgtcacgtgcgactccgacatccactccgccaacccactcgcgcaacgccacgagcgcgttcccgtggagcccttcttcgattccgcggaatccatcgtcaaagcctccgccaccgcctctttcgggttcgtcgtcccctccgacgatggcgctgcctccgacgtcttcgcccccgacgactccgactccgccgcctggctcatcccgaaccccaatttcgggtccaaactcatggacgcccccgaaatcaagtccaaggagatattcttctctgaaatggaccccttcctcgattttgattactcaaactccttccaaaaccacaacagcgccgtaaacgacagtgtcgttccagttcaaaccaaaccctctctcgcccctccccccatcaacaatcaccagcaccaccaccaatctgagacttgcttcgacatcgatttttgccgctcgaagctctcctcctttaactacccatcccagtctcttagccaaagcgtttcttcgtcgtcgcttgatgtcggagtggtgccggacgggaacacagtgtcggacatgtcgtattcgagtgggattgtggtgtcgggtggacaaggcgcgacgcagttgtgtgggatggatcgggaagcgagggtgctgcgatacagagagaaaaggaagaaccgaaaatttgagaagacgattcgatacgcatcgcgaaaggcttatgcggaaacccggcccaggataaaaggccggttcgcgaaacgaaccgaaattgactcggatgtggagcgtctctatagccctggcgctgcggcgctcatgctggacactccatacggtgtcgtaccaacgttttag

SEQ ID NO: 147 - DNA, 1011 bp, Glycine max
atgagagcagggaaagggagccaggaagaggatgagtacgaggaagaagagtttggttcttccaagaaacagggtacttcctctgcccctaacgccaacaaagcagatggaaaagccatcgacaaggctagtgcgataagatcgaaacattctgtgaccgagcagcggagaaggagcaagataaatgagagattccagatattgagggatctcatacctcatagtgatcaaaagagggacacggcatcatttttattagaggtgatggagtatgttcagtacttacaggagaaggtacaaaagtatgaaggttcatatcaaggttggggtcaagagcccctgaagttgatgccatggagaaatagtcattggcgtgtccagagctttgctggtcaacctacagctgtaaagaatggtttgggtccagtatcaccttttcctgtaaagtttgacgaaagcaatgctagtatctctccaactatgcttagtggcacccagaatacaatagatccttatcagagcagggatattgtcaacaagacggctgagaggcaacctgatttagtaaacaagggaatgcctcttccccttgctatgcatgcaaacatgtctgttcctgtcagaagtgatggtgtacttgcacatcctcttcatggaactgtttctgatccacaatcaactgaatgcccaacaactagtgaaccacagaaccaacaggatgaattcacggttgaaggagggacaattagcatctcaagtgcatattcccaagggttgttgaataatctaactcaagcgctacaaagtgctggtttagatctgtcacaggctagcatctcagttcagattaatcttgggaaacgaggaaacaaaggactgagttgtgggacctcttctcccaagcatcatgacaacccttcttcaaacaatcaaacaattgcacattttagagatgcaggcagtggagaagactcggatcaagtacaaaaaagaatgaaaacatataagtga

SEQ ID NO: 148 - DNA, 618 bp, Glycine max
atgttttccatcaatcatttctccgccccagatgcgaactcgccggggtcggggtcaggaacttcccgaccggtaccggcgctgtcggacgaggattattttctggcggcgagcaatcccaagaaacgcgccgggaggaagaagttccgggagacgcgccacccggtgtaccgcggcgtgaggaggagggactcaggcaagtgggtgtgcgaggtgcgcgagcccaacaagaagtccaggatttggctcgggacctttcccacggcggagatggcggcgcgtgcgcacgacgtggcggcgctcgcgctgaggggaaggtccgcttgcctcaacttcgccgactccgcgtcgcgtctcccggtgccggcgacggcggaggccagggacattcagaaggcggcggcggaggccgcggaggcatttcgcccggggaaggatgatggtgcggtggtggcgacggcgacggagcgtgaagaagaagaagaaaaggttgtaccagagtatctgaggaacatggtgctcatgtcgccgacgcattgcttcgggagtgatgaatatggaagcgctgacgtggaattcgacgatgctgaagttcggttgtggagttactccatttaa

SEQ ID NO: 149 - DNA, 738 bp, Glycine max
atggaatatagtcaatatactacttattcagcagaaggtgttgaggcagaaacttacacaagtagctgcaccaccccatcaagatcaaagaagagaaacaacaacaacacaagaaggttcagtgatgaacaaatcaaatcattggagaccatgtttgagtcagagacaaggcttgagcctagaaagaagttgcagcttgcaagagagcttggattgcagccaaggcaagttgctatatggtttcagaacaagagggctagatggaagtcaaagcaacttgagagagactatggcatactccaatccaattataacactttggcttcacgttttgaagctctgaagaaggaaaaacaaacattactaattcagttgcagaagctgaatcatctaatgcagaagccaatggagccaagtcagagatgcacacaagttgaagcagcaaacagcatggacagtgaatcagaaaatggaggcaccatgaaatgtaaagctgagggaaagccaagcccatcatcattggaaagatcagaacatgtacttggtgttctgtctgatgatgacactagcataaaggtggaagactttaacctagaagatgaacatggccttctgaattttgttgagcatgctgatggttccttgacttcaccagaagattggagtgcttttgaatccaatgatctatttggccaatcaaccactgatgattaccaatggtgggacttctggtcctga

SEQ ID NO: 150 - DNA, 963 bp, Glycine max
atgatggaacacaacatcatcgttaacaacaacaacgtgatcgcaccgtttgtcataaaaacctacaacatggtgaacgatcccaccaccgataaactcatcatgtggggcccagccaacaacagcttcatcgtcctcgaccccctcgacttctctcactccctcctccctgctttcttcaagcacaacaacttctccagcttcgttcgacaactcaacacttatggtttcagaaaggtggatccggatcggtgggaattcgcaaatgagtggttcctgcgaggacagaagcacttgttgagaaacatcgcgcggaggaagcacggtggagctgggaggagcaatttcaatttgcattcgcatcatcatccgttgaaggtggaggaattggacgacgaagccatggtgatggagatagcgaggttgaaggaggagcaaaaagcgttggaggaagagcttcaaggaatgaacaagaggttagagacaacagaaaaacgaccacaacaaatgatggcttttctgtccaaggttgtcgaggacccgcaggttctttctcggattctccgagaaagagaaaagaaacacctgggcgagaaaaagcgccgcctaattccgccgccaacaacgacggcagcgacgacgtcgtcgtcgtcgtcctccggcatcaagacggagttcgaagaagacgaaggtaattataatatcatgtcttcgtcgccagagacagggttggaaatcgataataataatatttgttcgcctctggcggcggggtattggggggaacagggttgtcatgggtacaatcgtggcgccgtgacggcgccgttgacggtggtggcgccggcggttccgacgatgggaggagggtatttggggcgtggggttttttttggggaaatggcggcggaggggaatgcggtgccgccttatccgttttcgttgttggaaggtggcttttag

SEQ ID NO: 151 - DNA, 981 bp, Glycine max
atggaacgaagtggcggaatggtaacggggtcgcatgaaaggaacgaacttgttagagttagacacggttctgacagtgggtctaaacccttgaagaatttaaatggtcagatttgtcaaatatgtggtgacaccattggattaacggctactggtgacctctttgttgcttgtcatgagtgtggcttcccactttgtcattcttgttacgagtatgagctgaaaaatgtgagccaatcttgtccccagtgcaagactacattcacaagtcgccaagagggtgctgaagtggagggagatgatgatgacgaagacgatgctgatgatctagataatgggatcaactatggccaaggaaacaattccaagtcggggatgctgtgggaagaagatgctgacctctcttcatcttctggacatgattctcatataccaaacccccatctagtaaacgggcaaccgatgtctggtgagtttccatgtgctacttctgatgctcaatctatgcaaactacatcagatcctatgggtcaatccgaaaaggttcactcacttccatatgctgatccaaagcaaccaggtcctgagagtgatgaagagataagaagagtgccggagattggaggtgaaagcgctggaacttcagcctctcggccagatgccggttcaaatgctggtacagaacgtgctcaggggacaggggacagccagaagaagagagggagaagcccagctgataaagaaagcaagcggctaaagaggctactgaggaatagagtttcggctcagcaagcaagggagaggaagaaggcatatttgattgatttggaaacaagagtcaaagacttagagaagaagaactcagagctcaaagaaagactttccactttgcagaatgaaaaccaaatgcttagacaaatattgaagaacacaacagcaagcaggagagggagcaatagtggtaccaataatgctgagtaa

SEQ ID NO: 152 - DNA, 990 bp, Glycine max
atgtatcattcaaagaatgttcctagtgcaagtttaattggtggtaattcattaagtcatggtcagcacatagattgtggtggcagcacaatggatcctggcagtggaggaaatggtcttagcaacaactctaatctcacctcaaaacaacgtttacggtggacacatgaattgcatgagcgctttgttgatgctgtggctcaacttggtgggccagatcgtgccacacccaaaggcgtgctcagagttatgggtgtacaaggcttgaccatttaccatgtcaaaagtcatttacagaaataccgacttgcaaaatatttacctgactcctcatctgatgaagggaaaaaggccgacaagaaagaaacaggggatatgctttccaatcttgatggttcatctgggatgcagattactgaagcactaaagcttcaaatggaggttcagaagcgactacatgaacaattggaggtgcaaagacagctacaattacggatagaagcccagggtaaatacctgaaaaagataattgaagaacaacagcgactcagtggtgttctttcggaggcacctggttctggtgctgtagcggtggttccaggggatgcgtgccaagaacctgataataagactgacccgtcaacccctgaccctgaaaaggctgccaaagaccgtgctccagcgaagagtctttcaatagaatctttttcatctcaccctgaaccaatgacaccagattctggctgtcatgttggttcccctgctgaaagccctaaaggggagagatcggccaagaagcaacgagtaaccatggatggtgtgtattctaaaccagaaatggtgcttccacatcagatactggagtcaagcatgtcatcataccagcaacctaacactgtttttcttggccaagagcaatttgatccttctttggatatatctaccaaaagtgatgaggaattggttaagattggtggcggtaatctgtga

SEQ ID NO: 153 - DNA, 1038 bp, Glycine max
atgtgtggaggagctatcatctctgatttcattccggcggcggcgatcgccgggtctcgccgcctgaccgccgattacctgtggccggatttgaagaagcggaagtctgacttggacgttgacttcgaggctgatttcagggattttaaagacgattctgatatcgacgacgacgacgacgatcaccaagtcaagccctttgctttcgccgcctcttctcgtctgtctacggcagcgaaatctgtggcattccaaggtcgggctgagatatctgcaaatagaaagaggaagaatcagtataggggaatccgtcaacgcccttggggaaaatgggcagctgagattcgggatccaagaaagggggttcgtgtctggcttggaaccttcaacactgctgaagaagctgcaagagcttatgatgctgaagcacggaggattcgtggcaagaaagccaaggtgaattttcctgaggcaccaggtacttcttctgtaaaacgttccaaggtaaatccacaggaaaatcttaagactgttcagcccaatctgggtcacaagttcagtgctggcaacaatcacatggatctggtggaacagaaacccctagttagccagtatgctaacatggcttccttccctggcagtggaaatgggctaagatcccttccttcgtctgatgatgcaaccctttacttcagttcagatcaagggagtaattcatttgattatgctcctgagatctcatccatgctttctgctcctttggattgtgaatctcattttgtgcaaaatgccaaccagcagcagcctaactctcagaatgtggtatctattgaagatgattctgcaaagacactctctgaggagcttgtggatattgaatctgagttgaagttctttcagatgccttatcttgaagggagctggggcgatacttcattggaatccttgctatctggtgacacaactcaggatggtggaaacctcatgaacctttggtgctttgatgacattccttccatggctggtggagttttctga

SEQ ID NO: 154 - DNA, 549 bp, Glycine max
atggcatcatcatcatcattatcatcatcaaagaggcatccattgtaccatggaatccgttgccgtggaggaaaatgggttactgaaatccgcgaaccgcgaaaaacaaaccgcatatggctggggacgttcctgactccggagatggcggccgcagcctacgacgtggcggcgttggccctgaaaggcggcgaggcggttctcaacttccctgactcggttggcgggtatccggtgccggcatccaaatcgcctgcggacattcgcaccgctgccattgctgcagcagaactcatgaagcctgaagcaagccacaacaacaacaacgttaatgcatcaacaacaaatgaggcagaagtagttcagtatgataacaataacgttttcacttcgtttgatactgagtttatggacgaggaggccatattttccatgccaagtttgctggtcgatatggctgggggaatgttgctatctcctcccagaatgagccctccctccgatgactcaacccaaagttatgttggagaaactttgtggaacttttga

SEQ ID NO: 155 - DNA, 1524 bp, Glycine max
atggatccaaaaggaagcttatgtgctaaaaactgcacaaggacctcttccttaacttctcctgggaatggactacaaacaaatttgtcctctgatcctccctctttctatggggtcaggattgaatcacctttcaaagaattcatccaaccctctcctccaactcaatctgtacttccaggtgaatctaatgcagatattgatatccctgaccaggaaaattgtccactgagtaactcatcacataccagtaaactccaagattggaatccaagtgcaatgttgaataacctttccttcctcgaagaaaagattcatcagcttcaggatctagtgcatgtaattgttaataaaaagtgccaaccttttggacaacctcatgaactggtgactcaggaacagcagctcatcacagccgatcttacatcgatcattgttcaattgatctctactgctggtagtcttctcccctctgttaggcacaccctcacaaacacaaatcccttggttggccagcttgaccagcttcatgggattaacctcccttttggatcagaaccaagtagtggtattaggccacaaaataacagtggaaataaactgtttgatcagtccactcagaatgatctaccaaataaattggaaatggaacaaaactacaatatggaagagcatgagccaaaagatgaagaagatgcggatgagggagaaaatcttccacccggttcctacgagattttgcaattagaaaaagaagaaatcctcgctcctcatacacatttctgtacaatatgtgggaaaggattcaagagggatgcaaatctccgaatgcacatgcgtggccatggtgacaagtacaaaactcctgcagctcttgcaaaaccacacaaagaaaccgggtctgaaccaaagcttatcaagaggtattcctgcccctatgccggctgcaagcgtaacaaggatcacaagaaattccaaccactaaagaccattttgtgtgtcaaaaaccactacaagagaacacactgtgacaagagctacacttgcagcagatgcaacaccaagaagttttcagtcatggcagaccttaaaactcatgaaaaacactgtggtaaggataaatggctttgttcatgtggcacaacattttcaaggaaagacaagctttttggacacattgctctattccaaggccatacacctgctattcctttggatgataccaaaggagtggctgagccacctgatatccagaacagagaaagcaacaataaggtagaaagtattaatttctgttttggatcaaatccttcaactgaaaacgtagttcaaaacatcatggacatgaaaggtaatattgatgatcccatgaattatttctcatcgttgaacttcgaaggctgtaactttggggcgtttaatgaattctcccaacctccatttgaagattcagaagcttctttctctttccccatgtcgggatcctataattatgctcccaaatttgacagcgacaatttataa

SEQ ID NO: 156 - DNA, 2733 bp, Glycine max
atgatgggagatggtggtgtgatatcatctgctgctaccatgatggaagctccaccacctgatggaacaacaacaacttcaatggattttgattacatgggtgagcttttcttagatgggtgctggatggaggcctctgctgatggatctgatttcttgctgcaaagtccttcattttccaataccctctttgacccttcattctcctggcctgccttggagaccaaccacaatgaatcccaggttgctgcttttgggagtcaacaagaaagtcataataacaacatggttagtgttgttgctggtggtgattatagtcagcagtttcagtctgagactcattcagttgaaggtgcatctgaaggtatcagaaggtggtggtttgcacccacacacactcccacacctagtccaggacctgggccttctataatggagaagctaataagggccctcatgtggatcaaagattacaataggaacaaagatatgcttatacagatttgggtgccagttcataaagagggtaggccgattcttgcagccgatgatcttctgttctcgcttgaatccaagtctctgaaccttgccaagtaccgcgaaatctctgtgacatataagttctctgcagaggagagtgactccaaggagttggcgtggggattgcccggtcgagtgtttagggacaaggttcctgagtggactcctgatgttagattctttaaaattgatgagtatccaagagttgaccatgctcaagagtatgatgtgcgtggaacgttggcagttccaatctttgagcaaggaagcaagacgtgcttgggggttattgaggttgtgatgactactcagcagattaactatggccctgaacttgagagtgtttgcaaagcacttgaggctgttgatcttagaagctcaaaacaattaagtattcagaatgtgaagcaggcatgcaacaggtcctatgaagctgcactacctgagattcatgaggtgctgagatctgcttgtgaaatgcacaaattacctttagctcaaacttgggtcccatgtgtccaacaaggcaaagaggggtgccggcactctgaagataattatctactctgcatatctcctgtggagcatgcttgctatgttggtgatccttctattaggtcatttcacgaggcttgcactgagcatcacttgttaaaaggtgagggtgttgctgggggagctttcatgacaaaccagccgtgcttctcagatgatataacttccttaagcaagaaagactatccaatgtctcatcacgcgaggttgtttggattgcgcgctgctgttgctatacgccttcgaagcatctataatagcacagatgactttgttctagagttcttcttgcccgtagattgcaatgacattgaagaacagagaaagatgcttacttcattgtccaacattatacaaagggtttgtcgcagcttgcgcgttataagagaaaaggaattggaggaagctaacttgtcagttaatgaagtgatagcccttgcagacagtggatttactagggatgaaatttgttcggaaccccaacaaaaagggatggttgcctcattggatactgaagaaaaatcaagtgaaacaatgggtagaaaattctctgaaccaaggcagcaacaagaaagtcctattttaaaaggaaaccttgactgtgttagggagtgttctacgtctgttgagggtaacttatcaagtccgggaacaagtaaaactggagagagaagacgggttaaagcagagaaaactataactttgcaagttcttagacaatattttgctggaagcctaaaagatgctgccaagaatattggtgtttgtactacaactttgaaaaggatctgccggcagcatgggataaagcgttggccttctcgaaagatcaaaaaggttggccactccttacaaaaacttcaacttgtcatcgactcggttcaaggtgcctctggtgcatttcaaatcaattccttctattcaaacttcccggatctagcttctccaaatttatcaggaactggcttcttctcaactttgaatcaaagtgataatccaaactcaacaagcacgcagcctgaacatggctcattgagcccagaaggtgcatcaaaatcaccctcttcgtcgagcagccagagttccatttcaagccattcctgctctagcatgtcagagctacaacagcagcacacaactaacattgccagtgacaaagatcctgccacggttggtgaatattctgctgatgttgtgttgaagttgatcagaaacgaggcaaagcttaaaagccttagtcaagatagagcaaagctcttgccaagatcactgagccaggaaacacttggtgaacacccgaaaactcagtatcaactgcctttattgaaaaccagtagcagcaaggtggattctcacagagtaaaagtcacatatggagatgagaaaacccggtttcggatgctgaaaaattgggtctatgaagatcttctgcaggaaattggtaggaaatttaatgtgagtgacatgagcaaatttgatgtcaaatacttggatgatgattgtgagtggatactactcacttgtgatgctgatttagaggagtgcattgatgtttgtcaatcttccgagagtggtaccatcaaacttagtctacaaccttctagtcatagtgtgagaagttctttagaatttagataa

SEQ ID NO: 157 - DNA, 1113 bp, Glycine max
atgaactacctgtaccctgtgaaagaagagtacttagaatcgccgccaccatcatcgtcgtcgccaacaacaggagttgatgagtcagcaatggttcctcctccgaggccaatggaggggcttcacgaaatagggccacccccatttctgaccaagacttacgatgcagtggaggaccccaccactagccacatagtttcatggaacagaggaggtgccagctttgtggtttgggatccacacgctttctccagagaccttcttcctagatacttcaagcacaacaatttctcaagcttcgtcaggcaactaaacacttacggttttagaaaaattgatccagataggtgggagtttgcaaatgaaggattccttagagggcacaggcaccagttggcaagcataaggagaaggaaacaaccttctcggccttattcttcttcttcttcttctcaacaagcacaaggtcactgtgttgaagttggtcgctttggacttgatgaagaggttgatcgtttgaggcgtgacaagcacgtgctgatgatggagcttgtgaggctgagacagcagcaactgaacacaaggtcataccttcaagcaatggaggagaggctaagagggacagaaattaagcagcaacaaatgatggctttcttggctagagctttgaagaatccaacttttattcagcagctacttcagcagaaggagaagaggaaggagcttgaagaggccatgtccaagaagaggagaaggccaattgagggagggccaagtggggttggagaaccaagcagtggaggagaagaaggaagaagcagtgttaaggttgagcctcttgtgttaggtgaatatggttttggagtgtcagagttggaagtgttagctatggagatgcaaggttatggtaggggaaggagggaacaagaggaggagcctgaggcactagaatcacaagagaggctggagaaagagcttgatgaagggttctgggaagaacttttcagtgagggttttgagggtgaattggatattccaacttcccaagaccaagatgaagatgtcagtgtgttggccaatcgctttggttacttgggttcaagtcctaaatga

SEQ ID NO: 158 - DNA, 1047 bp, Glycine max
atgttggatggagaagcaacaatgggcacgtgggctcgcatgtgcgacacgtgccgttcggccccctcctccgtgttctgccgcgcccacaccgccttcctctgcgccacgtgcgacgcgcgcctccacgcctcgctgacgtggcacgagcgcgtgtgggtgtgcgaggcctgcgagcgcgcccctgcggccttcctctgcaaggctgacgccgcctccctctgcgcctcctgcgacgccgacatccacgccgccaaccccctcgccagccgccaccaccgtgtccccatcctccccatcgccgccgcccccggcaacaacgacaacgacaacgtcgacgatgctgacttggacgacgatgacgaaaccgcttcatggctcttgctcaaccctgtcaaaagcgctagtgtccctaacaacaataacactaataatgggttctcgtataatggtgaggttgatgagtatttggaccttgttgatgactgcgacaaccaccactttgcttctgttgctactactacggaccattactctcatcagcaccaacatttcggtgttgtttctcacaagagttatgctggggacagtgttgttccggttcagcaccaccagcattttcagcttggcttggagtttgacaactccaaagctgccttcagttacaatgcttctgttaatcaaagtgtttcagtttcatcaatggatattggtgttgtacctgaatcaccgatgagggatgtctcaattggccatacaagaacccccaaagggacaattgacctattttctggacctcccattcaggtgccttcccatttttctccaatggacagggaggccagagtcctaaggtacagggagaaaaagaagacaagaaaatttgagaagacaatcaggtatgcctcaaggaaggcctatgcagagactagaccccgtataaaaggtcgatttgccaagagaacagatgtagaagctgaagtggatcagatgttctccacaacactaattacagaagttggatatggcattgttccctctttctga

SEQ ID NO: 159 - DNA, 636 bp, Glycine max
atggtgagaggaaagactcagctgaggcgcatagagaacgccacaagcaggcaagtcaccttttcaaagcggcgtaatgggttgctgaagaaggcctttgaactttctgttctttgtgatgctgaggttgctctcatcattttctctccaagaggaaagctttatgaatttgcaagctcaagcatgcaggacacaattgaacgataccgcaggcataacaggagtgctcaaacagtgaacagatctgatgaacaaaatatgcagcatttgaagcaagaaacagcaaacttgatgaagaagattgagcttcttgaagcttcaaaacggaagctcttgggagaaggtttggggtcatgctctttagaagaactgcaacagatagaacaacagttggaaaggagtgtaagcagtgttcgtgcaagaaagaatcaggtttacaaggaacaaattgatcaactaaaagagaaggaaagagccctatatgctgaaaatgctaggctgtgtgagcagtatggtggtatccagccacagccagcaacaaaggatccgaaagaaattcaaccctatgcagaaagcagtccaagttcagaagtggagactgaattgttcattggactactcaggtctagctattga

SEQ ID NO: 160 - DNA, 2163 bp, Glycine max
atggggttgatcgatctgaacaccacggaggatgatgaagctgctccattatctgcttcttcttctcactcggggataagcacttctgcttcaaccttggttgtttctcctcctccttctgtgtgcttggaactgtggcacgcgtgtgcgggccctttgatctctctgcctaagagaggaagtgttgttgtttacttgccacagggacactttgagcatgttcaggattttccggtcaatgcttttgatatcccaccccatgtgttctgtcgtgttcttgatgtcaagctccatgcagaggaagggagtgatgaagtgtactgccaagtgttgttggttcctgaaagtgagcaagtggagcatagcttgcgggaaggggaaattgttgctgatggggaagaggaggatactggagctacggtgaagtcaacaactccccatatgttctgcaagactctcacagcttcagacaccagcactcatggtggattctcagttccccgtcgggcagctgaagattgctttcctcccctggattacagtcaacagagaccttcacaagaacttgtggcaaaggatcttcatggcctggaatggaggtttcgtcatatatataggggccaaccacggaggcatttgctcacaactgggtggagtgcatttgtgaacaaaaagaagcttgtttctggagatgctgtattgtttcttaggggcaatgatggagaactgagattagggattcgcagggcagctcagttgaaatgggctggttcctttgcagttccctcaggtcagcaattgaatcctgcaactctcatggatgttgttaatgcattatctacaagatgtgcatttagtgtttgctataatccaagccttgactgttcttattcagttggaatgaggttcaggatgcgttttgaaactgaagatgcggcagatcgaagattcactggattaattgctggaattagtgatgttgatcctgttagatggcccggatcaaaatggagatgcctactggtaaggtgggatgacatagaagctgctaggcacaatagggtttccccatgggaaattgagccatctggttctgcttcaaattccagtaacttgatggcagctggtttgaagaggaacaggattgaaatgacttcagcaaagctggaatttcccaatcccaatgggattcaaacatcagactttggggaatcgttaaggttccggaaggtcttgcaaggtcaagaaattttgggtgttaatactcccccctttgatggtattaatgctcagagtccctggttatacgagttagggaggtgctatcctggttcaaactgttctgggattcctccaacaggaaataacatcagagtgccgcatccggcatctgatttttcctgcaatggcataggctttagtgaatctttccggttccagaaggtcttgcaaggtcaagaaattcttccaagccaaccatatggaagagccttatctattgaggaggctcgagcaaatggtcgctatggattttatgatggctgtcagttacttaactccagaaatggatggtctgcacagatgcatgacaatgcttcacatttgcatgcatctgttacacctgcgcaagtgtcatctccatcatctgtgttaatgttccagcaagcagttaatccagtttcaaactgtgattataacattaacaaatgtaataaggaaatggagggtagaatccattatcaaggcttatacacatctgaaatgaaaggtagaacattggcatcttccccatctgacgatcttattgtatctaggcgagctccagagggtgctagttctataggtatgtttgatgttcataatcagttgggtagttcacagttacatgaatcagtgtcagcattgagaagcagtcaaaagttggtttcctcatgtaaaagtagttgcagactctttggtttttcattgactgaggacacacatgttgcaaatgaagaggtatcagcctctaccatcactttaccattgagttctggaccttcgtttactagacttgttgaagatgagttccatcctggccattcgcatccgagtaaggcggttggaagtaactgcaccaagggtgtaattgttcatttcatggttcacactgattgtggataa

SEQ ID NO: 161 - DNA, 735 bp, Glycine max
atggagaatattggagaagagtacaagcattactgggagaccaacatgttcctccaaacccaagaacttgacagttgggggttggatgaggccttatctgggtactacgattcgagttccccggacggcgctgcttcgtctgcggcatctaagaacattgtttccgagaggaatcggaggaagaagctcaatgaaaggctttttgcgcttagatcggtggtacctaacattagcaagatggacaaggcttcgattatcaaggatgctattgagtacatccagcacttgcacgagcaagagaagattatccaagctgagataatggaacttgaatctgggatgccaagaaagagtccaagctatggttttgagcaagaacagcttcctgtggttctcaggtccaagaagaagagaacagagcagctatatgattctgttacttcaagaaacaccccaattgaagtccttgagctgagggttacatacatgggggagaaaactgttgtggtgagtttgacatgcagcaaaaggacagacacaatggtgaaactgtgtgaagtgttcgaatctttgaagctcaagatcatcactgccaacatcacttcgttttcagggaggcttttgaagactgtcttcattgaggcaaatgaagaagagaaagatcatttgcagataaagatccagacagccattaaagctcttaataatgaccctttaagccccatgagcatttga

SEQ ID NO: 162 - DNA, 684 bp, Glycine max
atgagttgcaacgggtgccgcgttcttcgaaagggatgcagcgagtcctgtatgttgcgcccttgtttgcagtggatcgaaaccgcccaagctcaaggccacgccactgtcttcgtcgccaaattcttcggccgtgccggcctcatgtccttcatttccaacgttccagaaaatcaaagacccgcgctgtttcagtcgctgctcttcgaagcgtgcgggagaacggtgaaccccgtgaacggcgccgtgggacttctctggaccgggaactggcacgtttgccaggccgcggtggagacggtgctccgcggtggcacgctgaggcccatgccggagctcatgggcctcgacgctcccgccgccgcggccaccgatgaagcatcggaggccgaagtggcctgcaccgacacgtggaggatccgaaacccgaacccgaattgccggttcacaagctcgcggtcctccggctgcggcggcggcggcaaacgcaagcggtcggaggagctggcaaagcttcaggcgcagccgaatctcgatctccggctgacgccggttttttcgcagaaggttgagagccgccggccggaatctccgtcgatgacatcggtggaatccggaacgacgacggagaacagatttggggatcagtggggtcaccggaaagttctcaaccttttcatttga

SEQ ID NO: 163 - DNA, 1011 bp, Glycine max
atgagagcggggaaagggagtcaggaagaggatgagtacgaggaagaagagtttggttcttccaagaaacagggcacttcctctgcccctaacaccaataaagcagatggaaaagccatcgataaggctagtgcgataagatcgaaacattctgtgactgagcagcggagaaggagcaagataaatgagagattccagatattgagggatctcatacctcatagtgatcaaaagagggacacggcatcatttttattagaggtgatagagtatgttcagtacttacaggagaaggtacaaaagtatgaaggttcatatcaaggttggggtcaagaaccctcgaagttgatgccatggagaaatagtcattggcgtgtccagagctttgccggtcaacccacggctgtaaagaatggtttgggtccagtatcaccttttcctggaaagtttgatgaaagcaatgttagtatctctccaactatgcttaatggctcccagaatacaatagatcctgatcagagcagggatattgtcaacaaaacggctgagaggcaacctgatttagtaagcaagggaatacctcttccccttgctatgcatgcaaacatgtctgttcctgtcagaagtgatggcgtacttgcacatcctcttcagggaactgtttctaatgcacaatcaactgaatgcccaacaactagtgaaccacagaatcaacaggatgaactctcggttgaaggagggacaattagcatctcaagtgcatactcccaagggttgttgaataatctaactcaagcgctacaaagtgctggtttagatctgtctcaggctagtatatcagttcagattaatcttgggaaacgggcaaacaaaggactgaattgtgggacctcttctctcaagcatcatgacaacccttcttcaaacaatcaaacaattgcacattttagagatgcaggcagtggagaagactctgatcaagcacaaaaaagaatgaaaacatataagtga

SEQ ID NO: 164 - DNA, 567 bp, Glycine max
atgcgttccagcaacggtacatcaagcagcagggcctccaacggtaacacagggcgccaccctgtttaccgtggagtgaggcgtaggagtagtggtaaatgggtttctgaaatccgtgagcccaaaaaacctaacaggatttggttagggacatttgccacccctgaaatggctgctattgcctatgacgtggcagcgcttgctcttaagggtaaggatgctgagctcaacttccctaactcggcttcctccctccctatccctgcatcatctgcagctcacgacattcagatggctgcagcactagctgcaaccgctgtcggagcagcgaatgatgcactggaaggaagccaaggaggaaatgtttcggtttcattggcggaagagttttcagggggaaacttaaatcactttgtggatgaggacttgatctttgacatgccgaatattctggtcaatatggctgaaggaatgctactcagccctcctcgttttgataattttgctgctaccgactatgaatacatggatgaagatcctaacctctgggggttccctaattactag

SEQ ID NO: 165 - DNA, 240 bp, Brassica napus
atggcttccaactccatgagttctaacgcgtcttggacacgtaaggagaacaaactatttgaaagggctttggctatatatgaccaggacactcctgaccgctggcataacgttgctagagcagttggtgggaaatcagctgaagaagtaaggcgacactacgagctactcattagggatgtcaatgacatcgagtcagggcgttatccacagcctacttaccgttcgaatggaaactga

SEQ ID NO: 166 - DNA, 240 bp, Brassica napus
atggcttccaactccatgagttctaacacttcttggacgcgtaaggagaacaaactatttgaaagggctttggctatatatgagcaggacactcctgaccgatggcataacattgctagagcagttggtgggaaatcagctgaagaagtaaggagacactacgagctcctcgtaagggatgtcaatgacattgagtcagggcgttatccgcatcctacttaccgttcaaatggaaactga

SEQ ID NO: 167 - DNA, 297 bp, Brassica napus
atggcctcaagttctatgagctcgtcttggacgtctaaacaaaataagatgttcgagagggctttagccgtttatgataaagacactcccgaccgttggcaaaacgtggccaaggccgtcggaagtaaatcggcagaggaagtcaaacgtcactacgacattctcgtcgaagatattgagaacatcgaacaagacttggtccctttgcccaaatacaagaccatcgatgttggaagtaaatcacgaggcatcaatgattttgatttgaggttaatgaagaatatgagaatccagtga

SEQ ID NO: 168 - DNA, 477 bp, Brassica napus
atgaacaaaactgaaatgggatcgcccgcgagcggaaactgctcgtccggtttacaaaactacggttctgagtcggatgagcggaagaggaagaggaaagagtcgaacagagagtcggcgaggaggtcgaggatgaggaagcagaagcatctggacgatctaacggctcaggtcgcttatctccgggaagaaaacagccatatcgtcgccgggatcgccgtcacgacgcagcaatacgttaccatcgaggcggagaactccattctcagagctcagtttctggagctcaaccaacgactagattccctcaacgagattgtggaaatcgccggaggattttggatggaaactggtcagggaggaggagtgatcgggttttacgacggagtgatgaatcctctcaatctagggttttataaccaaactctcatgggttctgcttctactgttcctgctgatgttttcaactgttgttaa

SEQ ID NO: 169 - DNA, 993 bp, Brassica napus
atggctaagaaaggagacaacatggactataccttgaaaaagaagagatgtgaagaatacatagaagcacttgaagaagaacaaaagaagatccaagttttcaagcgtgagcttcccctatgtttatcgcttgttacacaagcgatcgagtcgtactggaaggagttatccgaattttccaggtcagaacacattcaatcagaaggttcagagcggactacaagtgaatttgaaggcagagacggttgcattgccttgtctgaggagtttgtgccgatcaaatcttgtgaacgtgttaaagacgatgaagctgaaaataacgttgataagaagaaatctgaatggcttcaattatggaaccagtctcctgatcctcagcccatagaggaccagacaacaacggtggtggcggcggaggtaaacgaaaactgcggtgcgtttcagccgtttcaaaaaggaaagctcgcctattctcaaccgttgaaagcaatcactccaacgccgaaggcgtcgagttcaacggcggaaacaggcggaaataaaaaagagatggagcagcagaaacaattacagatgcatcggaagcaaaggcgttgctggtcgtcggaattacaccggagattccttcacgcgcttcagcggcttggaggatcacatgctgctacgcctaagcagattagagatctcatgcaagtcgatggtctaaccaatgacgaagttaaaagccacttacagaaatatagattgcacacaagaagaccagctactccgacattgaccaacggctgcgaaagtccacaacaacagcagttaattgttgttgaaggcatttgggtgccgtcaaaagatggagtgaataacagagtttacgctcctgtggcagtacaaccgccaccacgttcttcaccgtccgaaccaagaagcatccaacgttgcaaaccgcctacagcatcttcttctacacacccctcacaccttcttcctctgtcatga

SEQ ID NO: 170 - DNA, 870 bp, Brassica napus
atggcgtcgagaccgtgcgattcgtgcagatccgcggccgcgactctgttctgccgcgcggacgcagcgtttctctgcggcgaatgcgacggaaaaatccacacagcgaacaaactcgcctcgcgccacgagcgagtcttgctctgccaagtctgcgagcaatctcccgcgcacgtcacgtgcaaagccgacgcagccgcgctctgcgtcacgtgcgaccgtgacatccactccgctaacccactctcccgccgccacgagcgcgtccccgtcacgcctttctacgacgctccttcaaatgctgacgttagcatggaggctgcgtcttggctcttgcacaacccgagcgtcaaggaaggaggtgtagagatcccaaacttgtttgccgatcttgattactccggggttgatccgaagatggaggcgtcggagaatagctccggcaacgacggagtcgttcctgttcagaccagagctctgtttctcagcgaagattacttcaacttcgacatctcagcttccaaaacaactttcccacacggattcagctgcattaatcaaactgtttcgtcaacatcgttagatgttccgttggtgcccgaaggtggagctgtggtggagatgtcaagaacgacggcaacaccagccctgcagctatctccggcggagagagaggctagggttttgaggtatagagagaagaggaagaatcggaagttcgagaagactattaggtatgcatcacgtaaagcatacgccgaggtgaggccgaggatcaaagggcgttttgctaagcgaactgattcaagagttaatgatggaggagaggtcggagtctacggcgggttcggagtggtcccgagtttctga

SEQ ID NO: 171 - DNA, 945 bp, Brassica napus
atggaaaaagttttctctgtcgaagtaacctcctgtaataaccatctttggtcggagccggccaaagaatctgatggaacgtctggaatgaaccgcagtgactccgagtgggcattccatcgcttcattcaagaatcctccgccggtgaagatggcgtttccgtctctggaccgtcttctccggtagattctcatgaatacagagagattctgaagagtaaactcaatctagcttgtgctgctgtcgccatgaaaaggggagctttcatcaaacgtcaggatacctctggtagatctgagaatggtggggctgcttatacatctagtgcatcagaccaaggctccttagcttcttctactaaagctacaccagtgatgagcagtaccataacaagtggatctgagttctctggtgatgacgaagaagctgatggtgaaactaatatgcatcctaccaatgttaagcgtgtcaaaaggatgctctctaacagggaatcagctagacgatccagaagaagaaagcaagcacaccttagtgagctagagacacaagtttcacagctgcgtgtagagaactcaaacctcatgaaaggtctcactgacgtaactcagactttcaatgacgcatctgtagaaaacagagttttgaaagccaatctagagacactacgagctaaagtgaaaatggctgaggagacagtgaagagaatcacaggattcaacccaatgttccacacgatgcctcaggtttcaagcgtctctaatccttcagagacatcgaactctctagacacaagctcccaagtgactacaccggagatcagctcaagcagcaacaaaagcaaggccttgatgggttgcaaaatgaacagaacagagtcgatgaggagagttgctagcttggagcatctgcagaaacgtattcgcagcgttggggataagtag

SEQ ID NO: 172 - DNA, 555 bp, Brassica napus
atgaacataccaggaacctccaaagaaaatagcggtcgccaccctttgtacaagggagtgagacaacgaaagaactcagacaaatgggtttctgagatccgtgagccgagaaaacctaaccgtatctggttagggacattctcgaccccggagatggcggcaattgcctatgatgtggcagctctagccctcaagggaactcaaactgggctcaactttccaaactcagcctcctctttgcctgtcccagcctccatgtctccaggagacatccaagccgcagccgcttcagccgccgctgcttttggtgctgctagggatgcgattgtagtggccaataatagcagtgtggaacggagtaacgtgatgatgaatggtagttatgagaatacaaatggatttatggacgaggatttgatattcgacatgcctaatgtggtcatgaatatggctgaaggaatgcttctcagcctaccttgtcaattcacctttgatgctgcttccgaagctgatgattacgccggagaagacgattacttgtggaattttacttga

SEQ ID NO: 173 - DNA, 759 bp, Brassica napus
atgtcttgtaatagtggaatgtcttttttcccttcaagtttcatgatccaaaactcttacgaagacgatcatcctcatcagactccagctcttgcacccctccttccttcttgctccatgcctcaagatctcaatggatttgcttcatttataggtaagcaaatattagaagaggattattcagatgatgggtctcagatgggagagaagaagaggagattgaacatggagcaagtgaagacattggagaagactttcgagcttggaaacaaacttgaaccagagaggaaaatgcagttggctcgtgtcttaggtttacagccaagacagatcgcgatttggtttcagaacagaagagctcgctggaaaacaaagcagctagagaaagattatgatactcttaaactaaaattcgatgcacttaaagctgaaaacgatcgtcttcaaactcacaatgagaaactccaagctgagattatgggattagaaaataaagaacaaacaaaatctataaatctgaacaaagaaacagaagggtcttgcagtaacaaaagcgacaacatctccgataatcccagacttgatatctcgaggccaccgccgccatcaatagaaaacacaataaccgcaggtcacccaccgccgccgcaaacagttggtcgacacttcttcccaccgtcgccagccaccgcaacgaccaccacaacgacgttgcagttctttcaaaactcgtcttcaggacagagtatatatggttaa

SEQ ID NO: 174 - DNA, 948 bp, Brassica napus
atggaggatgacaaaaataataacactagcagcacgaacacaaacgtgatcgcacctttcgttgcgaagacataccagatggtcaacgatccttcgaccgattggctcatcacctggggacctgcccacaacagcttcatcgtcgctgaccctctcgacttctctcaacgcatcctccctgcttatttcaaacacaacaatttcagcagcttcgttcgtcaactcaacacctacgggtttaggaaagtggatccggaccggtgggagttcgcgaacgagcattttctcagagggcagaagcacctgctcaagaacatagcgcgtaggaaacacgcgcgtgggatgacggatgcggaggacggtgagatcgtgaaggagatcgaacggttgagagacgagcagagggagcttgagctggagattcagaggatgaaccaaaggatcgaggcgacggagaagaggccggagcagatgatggcgtttctctacaaggtcgctgatgatcccgacttcctccccaggatgatgctcgagaaggagcggacaaagcaattggtctcggacaagaagaagcgtcgtgtcacggtgaagtcagaggaaggggcagaggaggaggagagggtctttggtgtggtttcaccgtcgccttcgccttcgccggagaattcaataggatgggttgttccgatgcagaggcaggggacgtttggtagttactacaacgagacgggtatggtgacgaactcgatgatttctacttcgtcgaagtcatcatcgttaacgtcgacgttgtcgttgctggaaagcgtaaacagaggcggcggaggaggatgtgggagtattcagggagagacaagggacaaagaagcggcgacgtttggaggagtggtagagtcaaatccacaaacaccgccttatccgttttctttatttcgaggtggcttttag

SEQ ID NO: 175 - DNA, 489 bp, Brassica napus
atgcaggagcaagcgacaagctctctaccatcaagcagcgagagatcatcaagctctaatccgcatttggagatcaaagaaggaatcgaaagcgatgaggagatacggcgagttccggagttcggaggagaagccaccggaaaagaagcctctggatcggcgaatggtcaggacaggacacagatagctgtcggagaaggtcagaggaagcgagggaggactccggctgagaaagagaccaagcggctaaagaggttgttgaggaacagagtgtcagcacagcaagcaagagagaggaagaaagcgtacttgggtgagttggagaccagagtgaaagacttggagaacagaaactctgaacttgaagagagactctctactttgcagaacgagaaccagatgcttagacagattctgaagaacacaacaggaaacaagagaggaggaggaggaggaggaggtggttctaacgctgatgcaagcctttga

SEQ ID NO: 176 - DNA, 1314 bp, Brassica napus
atgaacgggcataggcttgtgccaacggcacaagaggaatgcaacaaaggaatccaaaaagcttgctcgtcttccctctctccagcctataactttctgaatgtccagccagaaagaaccaaatctcctttcatacggtcacaatctccggattggccaaagaatagtacgttttcacggtcttcaaccttctgcacaaacctctactcctcatcttcttcagccaatgagactcagaaacatttgggaaacagtcttcctttcctccctgatccctctgcttctgcttctggtgtggagtctgcaagatctccatctgtcttcagcgaggatttgggcaatccgtttgatggagacaacaactcctcgcttgtcaaagatttctttaatctctccgcggatgcttgttccaatggaggtggttatcatgatcttgactgttccaacgacaccttatcagatcagctggagctgcagttcctgtctgatgaacttgagctggccatcacagaccgagctgaaactccaaggcttgatgagatctatgaaaagccaatggcttcgccaaatccagtgactgtgctgagtccaagccaaagatgcgatgctggagcaatgtgcattgacccagtttcatctctcccttctccaagatcctcagcagcagccaatcacaagccgagaatgagatggacccctgagctccacgaaagttttttgaagtcagtgaacaaacttgaagggcctgaaaaggccactccaaaggctgttctcaagcttatgaatgttgagggcttgacgatctaccatgtaaaaagccacttgcagaagtatagactagcaaagtatatgccagagaaaaaagaagagaaaaagaatgttaactcagaggagaagaaactcgctttgagcaacagtgaagctgatgagaagaagaaaggggcaatacaactaactgaagctctccgtatgcagatggaagttcaaaagcaattgcatgaacaactcgaggtgcagcgggtgcttcagctacgaatagaagagcatgctaaatacttggagaagatgcttgaagaacaacgcaaagccggaaggctattttcttcttcttcttcttctcagactttgttatcacctagtgatgatgagactagaccagactctccaaacatgtccaagaccgaagcatctctgcctcagccttcatcatctgcaaagaacatagcttctgaaaccgaagacgatcaatgtgagtcccctcagaaacgccgcaggcttgagaacaatactaaacctcaagactctgagaggtag

SEQ ID NO: 177 - DNA, 729 bp, Brassica napus
atgtgtggcggtgctatcatttccgattttgttcctatcctcaccaaggccaagggtaggaaactcacggcggaggaactctggtctgagctcgatgcttccgccggcgactatttatggggtttccatcccacctccaagcttcagtccaccaaccaagaagaagtggcgttgaaagatgaggcggtggtgaataagagggagcctgcgacggagaaacggaggaggaagaacgtttacagagggatacgcaagcgtccctggggaaaatgggcgtcagagatacgagatccgcgaaaaggcaccagagtctggctcgggacgttcaacacggcggaggaagccgccatggcttatgacgttgcggctaagcgtatccgcggcgacaaagccaagctcaacttcccagatcttattcctcctcctgccactccggcgctgacgtcatctccaccatcagacgatcagcctccggcgaagaagctctgcttactctctcagagcgagttaactcagctgagtttcccggacgagtgcattgggttcgggaacggtggccagtttcagaaccatagttacgggtttgagcctggttacgatcttaaacagcagatatcgagcttggagtctttccttgagcttgacggtaccacggcggagcaaccgagtcagctcgacgagtcagtggatatgtggatgattgatgatgtcatctcatcgtatgcataa

SEQ ID NO: 178 - DNA, 288 bp, Brassica napus
atggcgtcaaactctagaagctcgtcatggacgtttaagcagaacaagatgttcgagagagccttggcagtttacgacaaggacacacccgaccgatggcacaatgtagcaaaagctgtcggagggaaatctgcagaggaagtgaagcgtcactatgacatcctcgtcgaagatctcatcaacatcgaaaccggtcgtgtccctttgcccaactacaagacattcgaatctaactccagaggcatcaatgacttcaacacgaggctaatgaaaaatttgaagatctaa

SEQ ID NO: 179 - DNA, 1296 bp, Brassica napus
atggaaacaggagaagatgatctgtgcaagaacaactggggaagtgcttccatcttggattacgagatggctagggaggatgaggaggaggagcctaatttgcatgttttcaaagcttcttcttcgtgccaagacaacaacaacaacggtggtcaagctagtgttgatttcctgcaaggcgtcaaggctcaagcgtgggatccgaggaccatgctgtgcaacctgtcttttatggaacataagattcacgaactgcagggtcttgttcatctcatccttggccgaaacggacagcttcaagacgagcagcggcaactcgtaaccgctgatcttacttccataatcatacagctgatttcaactgcaggtagtcttcttccatctgttaagcatcataatatgtctactacagccccaggttcagccttccatgaaatgaagaacgaagatgatgccgaggaaggagagaaccttcctcccggttcctacgagattaagcagcttgagaaagaggagatcctcgcaccccataccaacttctgcactatatgtggcaagggtttcaagagagacgccaacctgaggatgcacatgagaggtcacggtgacgagtacaaaactcccgccgctctggccaagccgaccaaagaaaccgtacccgggtctgagcagatgctggtcaaaaggtactcttgcccattcccgggctgcaaacgtaacaaggatcacaaaaagttccagcctctgaagaccatactgtgcgtgaagaaccattataaacgaacccactgcgacaaaagcttcacttgcagccgctgccataccaagaaattctctgtcattgccgatctcaaaacccacgagaagcactgcgggaaaaacaagtggctctgttcctgtggtaccacattctcacggaaagacaagctgttcggtcacattgctctgttccagggacacactcctgcgatcccacttgaagagacaaaaccttcagctgctgcatcttctcagagagggagctctggttgcgggaacaataacaacaacgcaggaatggttagtttcaatcttggttctgcaacaaatgctaatcaagaaacctcacagccttgtttcatggatgggaagataagcttcgaggagtctttctcgccgctgagctctgatacatgcaactttggagggttcccacgatctatatttgatgattcatttcaaatgcttatttcaagtgcatgtggttgctcgcccatcaatggtggtgatggctctgtttcggatactagtgtttaa

SEQ ID NO: 180 - DNA, 2286 bp, Brassica napus
atggaagatagtcttctccaaactgagaacacggttatggacactgagttcatggatggattgctactagatggctgctggttagagacaacagatggatctgttagcccttttgatccatcttccttcaagtggcctccaactcaagatacatcatctatctgcacatcagaagtagtatctcagacgtacggtcaggattgcgcaagtcttgatgagtttccatggaacaaaaggtggtggattggaccaggtggtggtggttcttctattactgagagactgttgtgggttccggttaacagaggtggtaagagagttttgaccacaagagaacaaccttatagccacgatcctacatgtcagagactagcaaactatagagaggtctctgtgaactatcacttctccgctgagaaagatgattccaaggccttagctggtttgcctggaagggttttcttggggaggcttcctgaatggactcctgatgttaggtttttcaggagcgaggagtatcctagagtccatcacgctcaggactgtgatgtccgtggaacgctggccattccggtgtttgagcaagggagtaaggtttgtttgggtgttattgaggttgtaatgactacagagatggttaaactagcacctgagcttgagagtatctgcagagcacttcaggcagttgatcttaggagcactgaagttcagattccaccttctctaaagggatgtgacttatcctacaaagctgcattaccagaaatcagaaacctcttgagatgtgcttgtgagacacataaactccctctagctcagacatgggtctcttgtcttcatcaaagcaaaagcgggtgccgtcacaacgatgagaactacatccactgcgtgtcaaccattgatgatgcatgctatcttggtgatccaacagtccgtgagttccatgaagcctgctctgagcatcacctcttgaaaggacaaggagttgcaggacaagccttcttgaccaatggaccttgcttttcacctgatgtctctaactacaagaagtctgagtaccctctctctcaccatgctaatatttttggtttgcatggctcggttgcaatacgcctacgctgcattcacactggctctgttgatttcgtcttggagttctttttgcctaaagactgtggtgatgtagaggagcagaggaaaatattgaacgctctttcaactattatggctcatgtgcctagaagcttaaggattgttacagataaggagctagaagatgagagtgaagtgatagtgacgccaaagatagagatcacatctgaacataccaaagattggttacaccaaagtaataatccagagaatcttggattaatatttgacgtgggagacaaggcaagtgatgagtttggtttgaaaagaggttttggttacaccagagactctaatatcaatgagagcagcactttctctagtaagatggctgagacaaagcgtacaaaagctgagaagacgatcacatttgatgttcttcgacagcacttcgcagggagtctgaaagatgcagccaagaacatcggtgtttgtccaacgacgttgaagagaatatgcaggcaacatggtatacagagatggccttcaagaaagatcaagaaagtgggacattctcttcagaagatccaacgagtgattgattctgttgaaggtgtttcaggtcttcttcccattggctccttcttcgcaaacttccctaacttagcctcgtcacaggaaccatccctacaaggcaaaacctctctttctccacagccattgcagctttcaaagtcacctgtttccccatacagtcacagttcaagctccagccaatgttgctccagcgaaacccaactaaacagcgacacaacaacaacaacaactgatgtaggaggaggtgtattgactctttctagtttagaaaacatccctcaaagtaccaacttgtcattgtcatctctagataatgactttctgaggattaaagttagctatggagaagagaagatcaggtttcggatggggaactcgcgcaggttaagtgatctactgtgggagatagggaagcggtttagcatagaggatatgagcaggtgtgatctaaagtacttagatgaagataatgaatgggttttgttgacttgtgatgaagatgtagaagagtgtgtaagtgtctgcagtaccacacggagtcataccattaagcttctgcttcatgtttcttctcattgttacaattcatggcaatga

SEQ ID NO: 181 - DNA, 1329 bp, Brassica napus
atggaatcggttcaatccgcaccgtcagcgaactcaaactcgccgtctatccctccgccggtgagctcagtgccaccctttttgagcaaaacctacgacatggttgatgacccttcgaccaatgatgtagtgtcctggagcagcgggaacaacagcttcgtcgtctggaacgtccctgagttctccaaagtgctcttgcctaagcatttcaagcacaataacttctccagcttcgttaggcagttaaatacatacggattcagaaaagttgatccagatcaatgggaatttgcaaatgaaggatttttaagaggccaaaagcaactactaaagggcattgtaaggagaaagcctcagaatcagcaacaaactcaagttcagaactcatctgttagcgcttgtgtggaggtggggaagtttggaatagaagaagaagtggaaagactcaagcgtgacaagaatgttcttatgcaagagcttgtgaggctgaggcagcagcaacaagcaacggaacaccagctgcagaacgtgggacagaaagttcaggtgatggagcagaggcaacaacaaacgatgtcgtttctagcaaaagcggttcagagtccaggctttttaaaccagttggtgcagcagaataatgatggcaataagcatattcagggaagcaacaagaagaggagacttcctggagatgaagaggagagttgtggagagcttaaccgtcagattgttaagtaccagccgtctataaacgaagcagcacaaactatgcttagacaggtcttaaatagaagtagctcaccggtttcaaacaatcctgagagtttcctcttgagtgatgctcccagttctaactctccaaactcagctcactcagcaatgaatcaagtacacgaggcaggtttggtggatcatcttcaagctggtccaagtccaagccaaggaggagtagcagctgcagcttcttggagccctgaatctgagttagttggactggagacaggtgatggagtgtgtttcgatccaataatggctgctttaggtggctcgctggaaatagaaagcgatgaagtttctcctgtaggtgagggagagatgactgagttacagaacgaggccccgaagctgccaggagtccaagattcattctgggaacagttctttgctgatgaaaccgcggtgattggtgaaggagacgtcattatttcagaagcagtggagaactgtgagatggtaatggagcaagaaccgaaggagtggaagcaacaagaaatgaaccatcttactgaacaaatggaacttctttcttcagaagcacagaggaaatga

SEQ ID NO: 182 - DNA, 1014 bp, Brassica napus
atgttgaaacaagagggtaactgggcacaaacctgtgacacatgccgatcagccgcatgcactgtctactgccgagctgattctgcctacttatgcaccagctgcgatgctcaaattcatgcagccaatcgtcttgcttcccgccacgaacgtgttagagtctgtcaatcatgtgagcgagccccggctgccttcttctgcaaggcagatgctgcttccttatgcacggcttgtgattcacagattcattccgcaaacccacttgctagacgccaccagcgtgttccaatcctgccaatctctggttccatggtcactaaccgttcaagtgagacgacagaggcagaggacatagtggtggtgggtcaagaagaagaagatgaagcagaggcggcttcttggttgttgcctacttcagttaaaaactgtggtgacaacaacaataacaacaacaacagtcaggacaataggttctcggttggtgaagagtatctggaccttgtcgattacagtaagtatcaacaagactacaacgtacctcagaggaggagctatgtggcagatggggttgttccacttcaggttgaagtatcaaagagtctgagtcacatgcaccacgagcaacacaactttcagtttggtttcaccaatgtctcctcagaagcttccccaattcatatggttagtcttgtgccagagtcaacattgagtgagacaacagtatcgcacccaagatctcccaaagcggcaatggaggagctacctgaagccccagttcagatgctgagtccaatggagagaaaggctagggtcatgaggtatagagagaagaagaagacaaggaagtttgagaagacgataaggtatgcttcaaggaaagagtatgcagagaaaagaccaaggatcaaaggccggtttgcaaagaggaacgaagttgatgcagaggaggcagacaaagctttctcctcaatggtcatgtttgacacaggatatggaattgttccttcattctga

SEQ ID NO: 183 - DNA, 642 bp, Brassica napus
atggtgaggggaaaaactcagatgaagaggatagagaatgcaacaagcagacaagtgactttctctaaacgcaggaatggtttgttgaagaaagcctttgagctctcagtgctttgtgatgcggaagtttctctgatcatcttctctcctaagggaaaactttatgaattcgccagctccaatatgcaagataccatagatcgttatctgacgcataccaaggatcgaatcagcaacaaaccggtttctgaagaaaatatgcagcatttgaaacatgaagcagcaaacatgatgaagaaaattgaacaacttgaagcttccaaacgtaaactcttgggagaaggcataggatcatgctcgattgaggagctgcagcaaattgagacccaacttgagaaaagtgtcaaatgcattcgagcaagaaagactcaactgtttaaggaacaaattgagcagctcaagcaaaaggagaaagctctagctgcagaaaaccagaagctcactgaaaagtggggatctcatgaaatcaaagtttggtcgagcaagaacaaagaaagtggaagaggtgacgaagagagtagtccaagttccgaagtagagacagaattgttcattgggttgccttcttcttcaagaaagtga

SEQ ID NO: 184 - DNA, 1878 bp, Brassica napus
atgtacggagagctgtggaagctatgcgcgggacctgtggtggatgtacctcaagctgcggaaagagtcttttactttcctcaaggtcacatggagcaactggaagcgtcaacgcaacaggacttgaacgcggtgaaaccgacgaaaccgcttttcgatcttcctccgaagattctctgcagagttatggacgttcgtcttcaggcggagaaagatacggatgaggtatatgctcagattatgttgatgcctgaaggaacagttgatgaacctatgagtcctgatccttctcctcccgagtcgcaaaggccaaaggttcactctttcagcaaggttttgactgcgtctgatacaagcactcatggtggcttctctgtccttaggaaacatgctacagagtgccttcccccgctggatatgactcagcaaactccgacccaggagttagtagccgaagatgtgcacggctatcagtggaaattcaagcatatttttagaggtcaaccacggaggcatcttttgaccacagggtggagcacctttgttacagccaagagattggtagctggggacacctttgtgttcctgagaggggagaatggagagttgcgggttggagtcagacgtgctaatcgtcaacagaccaatatgccttcatccgtcatatcaagtcatagcatgcatctgggagtgcttgctactgcatgtcatgctactcaaacccgatctatgttcaccgtttactataaaccaagaacaagccaattcatcattagcttgaacaaatatctggaagccatgagcaacaagttctctgtaggaataagatttaagatgaggtttgagggagaggattcccctgaaagaagattttctggcacggttgttggtgttaaagactgctccactcactggaaagactcaaattggcgatgcctagaagtccactgggatgagcctgcatcgatttcaagaccggataaggtttcaccatgggagatcgagccgtttgtaacttcggaaaatgttcctcactcagttatgccaaagaacaaaaggccgcgtcattatagtgaagtatctgcacttgatgtaggcaaaacagcttcaaacctttggagttctgcactgacgcagtcccatgagtttgcacaatcgtgcatcacctcacagaggaattctcctcagcaatgttatcgtgatgcgactgaagatgctaaaaactctgattggtcagccagcccttactctgcaacactgaacaaccaaatggttttcccagtcgagcagaagaaacccgagactaccgctagttatagattattcggaattgatctgttgagctcctctatacctgctaccgaggagaaaactgcaccgacgctaccaataaacataaccaaaccaactccagacagcaactcagacccaaaatcagaggtctcaaaattatcagaggagaaaaagcaggaacctgcgcaggcgtcatcaaaagaggtccaaagcaaggaaatcagttctacgagaagccgtaccaaggtgcaaatgcaaggcgtaccggtgggcagggctgtggatttgacagtactaaatgggtacagtgagcttatagacgaccttgagaagctgtttgacatagaaggcgagctgaaaagtcggaatcaatgggaaatagtgttcacagacgatgagggagatatgatgctcgtcggtgatgatccatggcctgagttctgcaacatggtgaagagaatattcatatggtcaaaagaggaagtgaagaagatgacgcccgggaaccaactccggaaactgttaacggaagttgacacaacattaacaacaacaatctctaaaacagagaatcattccaactaa

SEQ ID NO: 185 - DNA, 741 bp, Brassica napus
atggataacgtcgaccaagagttcaacaattactgggaaacaaactccttcctccaaaacgaagacttcgaatatgacagctggcctttggaggaagcgatttctgggtcgtatgattcgagttcgcctgatggggcggcttcgtctccggcttctaagaatattgtgtcggagagaaacagaagacagaagcttaaccagagactcttcgctcttcgatcagttgtccccaatatcactaagatggataaagcatcaataatcaaagatgcaattagttacatacaagggttgcaatatgaagagtcgaagctcgaagcggagatcagagaacttgaatctactccaaagagtagcctgagcttcagtaaagattttgatcgtgatttgctggttcctgtcacatccaagaagatgaagcagcttgattctggtccttcccgttctctcattgaagttctcgaactgaaggtaacattcatgggagagaggacagtggtagtgaatgtaacatgtaataagaggacagacacaatggtgaaactgtgtgaagtctttgagtcattgaatctcaaaatcatcacttccaatctcaactctttctctggcatgatcttcaacactgtctttgttgaggcggaggaagaagaacaagaggtggtgagattaaaaatagaaacaggaataggagcttataatgaaactcaaagccccactttgagcatcgactctctttactaa

SEQ ID NO: 186 - DNA, 666 bp, Brassica napus
atgagttgcaatggctgccgtgtgctccgaaaaggttgcagcgagaactgcatcctcaggccatgtatccaatggatagaaaccgccgacgctcagggacacgccaccgtcttcgtcgctaaattcttcggccgcgccggtctaatgtctttcatctccgccgtaccggaatctcaacgtccggctctgtttcagtctttgctatacgaagcttgtgggagaacagtgaatccagtcaacggagctataggaatgctgtggacgggtaactggaatatctgccaagctgcggttgagacggtgcttcgtggcggttctttgagacccatcccagggcttctcgctcacggcggcggattcgctggctttccatcggttacatctgaagaaggctcaagatccagatctacgctggactcttctcctaagaagcgtaggcgagttgattcttcggagctcgatctttcactaaaccctaatttatccactaaaacaacgccttctcccacacggcagcgatcaggaacaccgtccatgaactctgaggagtcagtggcgacgacgactactaccacgacgtcgttttgtgacgccacccccacaggtgaacggtacggtaacggcggaggaggagaggccagcaagctgcttaagctttttgtttaa

SEQ ID NO: 187 - DNA, 1632 bp, Brassica napus
atggagcttcctcaacctcgtcccttcaaagctcaagggagaaaaccaacacatgattttttatcgctctgcagtcatccaactctccagccagatccaaagcctacaccaccaccttcttctcaaggtagccacttgaaaacccatgattttctacagccgttagaatgtgttggtgctaaagaagagacgagtaggattgacacaaccaggatagcctctgagaagccacccccgcctgcaccgcctccaccgctgcaacacgtgcttcccggtggaataggaacgtacacgataagtcctattccttattttcataatcagcagaggattcctaaaccggagctgtcaccacccatgatgttcactgctgctgcacaaacgggtggtggtaatgagagaatcgttgtagacgagaattcgaattctaatagcagctcatacgctgctgcagcaagcggattcactttgtgggatgaatctggttctgggaagaagggacagacaaggaaggagaataatgctggcgaaagagctagcatcagagctgatggtgcagcaactatgggacagtgcccagtggtggaacgaaggtcacagtctttgacaaatacccctttgagcggtttcagttctcgctcatcctctcaagggtctggactcaagagccagagcttcatggacatgctaagatcagcaaaaggaacttcacaggatgatgatttggatgatgaagaagattttgtcatgaagaaagaaagctcctccactagccagatccacagagatttgagggtaaaagcagaggcgagaggcggtggtaacgatcaaaagctgaacacgcctaggtctaaacattctgctacagaacaaaggaggaggagcaagatcaatgatagatttcaaatgttgagacaactaatacctaacagtgaccaaaagcgggacaaggcctccttcttactagaggttatcgagtatattcagttcttacaggagaaaacaagcaagtacgagactccttaccaaggatggaatcacgaacctgccaagctattgaattggcaaagaaacaaccaacagctagtacctgaaggaaccgttgcttttgctccaaaattggaagaagagaagaataacattccggtgccggtgcttggaacaacacaaggcgttgttatagaccgtccagaaacactgaaccgagcaacgccagcgaccggggcatttcctttgtcagctcaaagcaacagttttatctctcctgtaattgcgggtaaccccgtaaatcagttgcacacaagagtcgcagcatcagagaccttagagccaagccagagttctcggggtcatactcagccattgaaagaagaaggtggtgatgaggaagttcatgcgggtaacatcagtatatcaagtgtttactcacaaggattagtgaaaacactaagagaagcattggagaattcaggagtggacttaacgaaagcaagcatctctgtcgaaatcgagcttgctaaacaatcctcttccttcaaggatcatgaaccccgtggattagtttctaccggaaacgatgaccccaagcaaactcggcaaccaaaacggctgaagacgaacaacacaagttaa

SEQ ID NO: 188 - DNA, 714 bp, Brassica napus
atgtcgaacactagcgattctccgaccaccgggaataaacaaacgacgacgtttcctctagcttcagtcgcattgccttccaaaacttctgatcatccgtctcctcaatcttctccaggctcatcttcttccccatctccgacaccaagaccttctcactccgccggtggatcttccacgaagagaacgacgaccggattatccggccggcactcttttttcagggggattcggctacggaacggaaaatgggtgtcggagattcgagagccgcgtaaaacgacgcgaatttggctcgggacttatccggtaccggagatggctgccgccgcttacgacgttgcggcgctggctctgaaaggccccgacgccgttttgaattttcctggtttggctttgacgtatgtggctcctgcttcgaactctgctgcggatataagagctgccgccgcgagagccgccgagatgaagcaaccggacccgggtggagtcgagaaggtaatggaaccgggtcaacccggaagggaggaggaggaaaaagcaatgctttcttcgttggagtttatggacgaggaagccatgttggatatgccgaatttgttgacggagatggcggaagggatgctgatgagcccaccgagaatgataaatccgacgatggaggatgattcgccggagaatcatgaaggagatagtctctggagttacaaatga

SEQ ID NO: 189 - DNA, 276 bp, Oryza sativa
atgtcttctaggtcaagcagctcctcccgcaacagcaacagtgtcaacatggactcagagtggagcaaaaaggagaacaagctgttcgaggaggctcttgcctactacggcgagggcgcgcctgacctctttcacaaggtgtctcgcgccatgggaggcaccaagacagccgatgaggtgcgccgccactatgagatcctcgaggacgacctcaagctgatagaggcaagaagagtcccgttccccaagtacaatacacagggagcatggaactga

SEQ ID NO: 190 - DNA, 258 bp, Oryza sativa
atgtctgggtcccggagctcctcccccaactcgaagtctgagtggagcaggaaggagaacaagatgttcgaggaggcgctcgcctactacggcgaggacacgcccaaccggtgggacaaggtggccagcgccatgggaggcatcaagtccgctgaggagatccgctgccactacgaagacctcaccgatgacgtcaagacgatcgagtccgggcgagtgcagttccccaagtacaagacgcagggatactggacctga

SEQ ID NO: 191 - DNA, 306 bp, Oryza sativa
atgagttcatcctggacaacaaagcagaataaggtgtttgagagggcgctggcaatatatgacagggatacgccagatcgctggcagaatgtggcacgggcagttggtggtggaaagtcagttgatgatgtgaagaggcactatgaaaagctgatcaaggacgtggatcgcattgactctacaggaggccatcaaggatcccattacaacagctccaatgctagcagcagcagcagcagcagcagcagcaactctcggggcagtgccaatgaggaccagaggaggaggtaccacaactttcagtga

SEQ ID NO: 192 - DNA, 1278 bp, Oryza sativa
atggagcgggtgttctccgtggaggagatctccgacccattctgggtcccgcctccgccgccgcagtcggcggcggcggcccagcagcagggcggcggcggcgtggcttcgggaggtggtggtggtgtagcggggggcggcggcggcgggaacgcgatgaaccggtgcccgtcggagtggtacttccagaagtttctggaggaggcggtgctcgatagccccgtcccgaaccctagcccgagggccgaagcgggagggatcaggggcgcaggaggggtggtgccggtcgatgttaagcagccgcagctctcggcggcggcggcggcggcggcgacgacgagcgcggtggtggaccccgtggagtacaacgcgatgctgaagcagaagctggagaaggacctcgccgcggtcgccatgtggagggcctctggcacagttccacctgagcgtcctggagctggttcatccttgctgaatgcagatgtttcacacataggcgctcctaattccatcggaggcaatgctactccagttcaaaacatgctaagtggcccaagtgggggatcgggctcacagttggtacagaatgttgatgtccttgtaaagcagcccaccagctcttcatcaagggagcagtcagatgatgatgacatggagggagaagctgagaccactggaactgcaagacctgctgatcaaagattacaacgaaggaagcaatccaatcgggagtcagccaggcgctcaagaagcagaaaggcagctcacttgaatgagctggaggcacaggtatcgcaattaagagtcgagaactcctcgctgttaaggcgtcttgctgatgttaaccagaagtacaatgatgctgctgttgacaatagagtgctaaaagcagatgttgagaccttgagagcaaaggtgaagatggcagaggactcggtgaagcgggtgacaggcatgaacgcgttgtttcccgccgcttctgatatgtcatccctcagcatgccattcaacagctccccatctgaagcaacgtcagacgctgctgttcccatccaagatgacccgaacaattacttcgctactaacaacgacatcggaggtaacaacaactacatgcccgacataccttcttcggctcaggaggacgaggacttcgtcaatggcgctctggctgccggcaagattggccggacagcctcgctgcagcgggtggcgagcctggagcatctccagaagaggatgtgcggtgggccggcttcgtctgggtcgacgtcctga

SEQ ID NO: 193 - DNA, 1047 bp, Oryza sativa
atggggctggacgtgggggagatcgggatggggctggatttgagcctggacctgaagatgttcgcggcgaggagcgccgtgaggatggcggcggcggcggccaaggaggcgacgggggtggaggcgtgcatcaggagcctcgaggaggagcgccgcaagatcgagatgttcaggcgcgagctcccgctctgcgcccgcctcctcgccgacgtgatcgagctgatgaaggaggaggccgggaagaggaggaaggacggcgacgacgcggaggcgaaggcggaggacggcgacaagacgaaatggatgagcaccgcgcagctctgggtggacagccgcggcagcgacgccgattccgagaatgaccgacggagcgggagcacctcgccggcgtcgaggttgctcggcggcgcggaggagtcgtcgtcgagggccgtcgcgccgccgccgtactttaggagggaggaaagggtggttctacgacccgctatgccgttgctgcctccggcttcccacaggtcgcctcctccggcggcggcggcggctgccaccgccgccggcgatgaccaccggcacgttgtcgcgtcaagctttgccaccgccgtgccgtcacccgtcccggcggcgcttagcttgcaggctcaggcgcagcagcagcagcagcaggcgaggaagtcgaggcggtgctggtcgccggagcttcaccggcagttcgtcgccgccttgcagcagctcggtggcccccaagttgctactccaaagcaaatcagggaggtgatgaaggttgatgggctcaccaacgacgaagtgaaaagccatctccagaagtatcggctgcacaaccggaaatcaccaggcacagcttcagcgagccattcgattgtacttgttggtgatctctgggcttctcaggaagtaagctgctctcaatccggatcacctcaaggtccccttcagctctccggctcaggggtggccgtctcggcggccaccgccggcgacagctgctgcgaggatgatgacaagtcggaaggctatgtccgaaaatga

SEQ ID NO: 194 - DNA, 999 bp, Oryza sativa
atggaggcggtggaggacaaggcgatggtgggagtgggaggagcggtggcggcggggtactcctcgtcgtcgtgggggttggggacgcgggcgtgcgactcgtgcggcggggaggcggcgcggctctactgccgcgcggacggggcgttcctgtgcgcccggtgcgacgcgcgggcgcacggcgccgggtcgcgccacgcgcgggtgtggctgtgcgaggtgtgcgagcacgcgcccgccgccgtcacgtgccgggcggacgccgcggcgctgtgcgccgcctgcgacgccgacatccactcggcgaacccgctcgcgcgcaggcacgagcgcctccccgtcgcgcccttcttcggcccgctcgccgacgcgccgcagcccttccccttctcccaggccgccgcggatgccgccgcggcgcgggaggaggatgcggatgatgaccggagcaacgaggccgaggcggcgtcgtggcttctccccgagcccgacgacaatagccacgaggatagcgccgcagccgccgacgcgttcttcgccgacaccggcgcgtacctcggcgtcgacctggacttcgcccggtccatggacggaatcaaggccatcggggtaccggtcgcgccgcccgagctggacctcaccgccggcagccttttctaccccgaacactccatggcccacagcttgtcgtcgtcggaggtcgcgatcgtaccggacgcgctgtcggcgggctcggcggcgccgcccatggtggtggtggtggcgagcaaggggaaggagagggaggcgcggctgatgcggtacagggagaagcgcaagaaccggcggttcgacaagaccatccggtacgcgtcccgcaaggcgtacgccgagacgcggccgcgcatcaagggccggttcgccaagcgcaccgccgacgccgacgacgacgacgaggcgccatgctcgccggcgttctccgccctcgccgcgtcggacggcgtcgtgccgtcgttctga

SEQ ID NO: 195 - DNA, 906 bp, Oryza sativa
atgaagcgcggcggcgccggtgtcggcggcggcggcggcggcggcgatccgggcgcctacgcggcggtgctgaagacgaagctcgacctgtactgcgcggccgtggctaaatcgatggaagctaaactgcaagaatcttctttgggctacctcaatttacaagcctcagacacttcacaattggtttctcaagattcttttaatggctatggatcaaccagagtaacaaactcaaatgccatacatgaagatgacgatcaaggtaaaccagctaatagtggtacatcaaaggaacagtcagatgatgatggcgatcttgaggaagatacggaccccgttaatgcaaagcggacaaggagaatgctgtcaaatcgggaatcagccaggaggtcaagaaaaaggaagcaagctcacctaaacgatctagaatcacaggtttcccagttaagatctgagaatgcatctctgcaaaagcgcttgtctgacatgactcagaaatataagcaatctaccacagaatatggcaatcttcaagatgacatgaacgctatgaggagaaaggtgaatatagctgaagaagcggtgaggagagtaactggaataggacttcaattgttcactacatctgaaatgcctgcaagcagcatgcccgtttcttcaggtgtatcagacgcagcttctgctgctgctgctgctgctctcgtcgaagacgactggacaaactgtagcctcccagatgaagcaattcctgtgccaagtgcagcaatggccttgaggtcaccgtccgtgcggcgtgtcgcaagcttggagaacctgcagaagagaatccatgctggagatgtgacacattttgaggcagcatcagccttgtcattgcctgaagctactgcctgtgataataagtag

SEQ ID NO: 196 - DNA, 645 bp, Oryza sativa
atggagtactacgagcaggaggagtacgcgacggtgacgtcggcgccgccgaagcggccggcggggaggaccaagttcagggagacgaggcacccggtgtaccgcggcgtgcggcggcgggggcccgcggggcggtgggtgtgcgaggtcagggagcccaacaagaagtcccgcatctggctcggcaccttcgccaccgccgaggccgccgcgcgcgcccacgacgtcgccgcgctcgccctccgcggccgcggcgcgtgcctcaacttcgccgactcggcccgcctcctccgcgtcgacccggccaccctcgccacccccgacgacatccgccgcgccgccatcgagctcgccgagtcatgcccgcacgacgccgccgccgccgccgcctccagctccgccgccgccgtcgaggcctccgccgccgccgcgcccgccatgatgatgcagtaccaggacgacatggcggcgacgccgtccagctacgactacgcgtactacggcaacatggacttcgaccagccgtcctactactacgacgggatgggcggcggcggcgagtaccagagctggcagatggacggcgacgacgatggtggcgccggcggctacggcggcggcgacgtcacactctggagctactga

SEQ ID NO: 197 - DNA, 831 bp, Oryza sativa
atgaatggtcgaacacagctagctagctgggctaggatcgccatggatcggggtgaccaccaccacctccagcagcagcaccagttcttgatgccaccgcctgcgccggtggtgccgccgcagctgtgcatgccggcgatgatggcggacgagcagtacatggacctgggcggtggcggggcggcggcggcgccggggaggggcggggccggggagaggaagcggcggttcacggaggagcagatacggtcgctggagtccatgttccacgcgcaccacgccaagctggagccccgcgagaaggcggagctggcgcgcgagctgggcctgcagccgcggcaggtggccatctggttccagaacaagcgcgcgcggtggcgctccaagcagctcgagcacgactacgccgcactccgctccaagtacgacgccctccactcccgcgtcgagtccctcaagcaagagaagctcgctctcaccgtccagttgcacgagctaagagagaggctgagggaacgggaggagaggagcggcaacggtggtgccgccacgacggcagcaagcagcagcagctgcaacggatcaggcagcgaggaggtcgacgacgacgacgacaagaggaacgccgccgcggggtgcctggacctcgagccgccggagagctgcgtgctcggcggcgcgacgtgcgccacgccggcggacgtgtcggtggagtcggatcagtgcgacgaccagcttgactacgatgagggcttgttcccggagtccttctgcgccacgccggagctgtgggagccatggccgctcgtcgagtggaatgcggtggcttga

SEQ ID NO: 198 - DNA, 897 bp, Oryza sativa
atgacgacgacgacggcggagggcggtggcggggtggcgccgttcgtggcgaagacgtaccggatggtggacgacccggccaccgacggcgtcatcgcctggggcagggacagcaacagcttcgtcgtcgccgaccccttcgccttctcccagaccctcctccccgcccacttcaagcactccaacttctccagcttcgtccgccagctcaacacctacgggtttcgcaaggttgatccggacaggtgggagttcgcgcacgtgtcgttcctgcgcggccagacgcacctgctgcgccggatcgtgcgacggagcagcggcggagggggagcgaagaggaaggaggaggccggcggttgcggcggcggaggggaggcggccgccggggacgtcgacgaggagagcgccgtggtggccttggaggtggcgcggctgaggcgggagcagcgggagatcgagggccgcgtcgccgcgatgtggcgccgcgtgcaggagacggagcgccgccccaagcagatgctcgccttcctcgtcaaggtcgtcggcgacccgcaggtgctgcgccgcctcgtcgacagggacaacaccaacgccgccgcctccaacgccgacgactccgccgtgcatcatcaggtcaagaggccgcgcctcctcctcgactcatcctccaccaccaccacccacggcgaccgccacctcgtcaccgccgccgcagacgggttctacgccggcggctgcggcccggaggccgcagctgccgccgcgttcgtgccggacgacgcggtcgacttcaccggcctctacaccggcggcgacgggttcggcaacgccgtcgtcgacgccggcgtcgactacccgccggcgtacgcgttcccggtggtggacagcggctactaa

SEQ ID NO: 199 - DNA, 1083 bp, Oryza sativa
atggcgacaacacgcgcatctctcaccgatcccctccttccctctcccgcggcacgcgcgccagttaaagccaaaaagctctcatggtccatgcttcacgcaagcagcaaggacgagaggagaggacagagtggggaagctgaagctgaagcaagcggaggagtgcacgcgaatccctcctcgccggcgagaatgcaggagcaggcgacgagctcgcggccgtccagctccgagaggtcgtccagctccggcggccaccacatggagatcaaggaaggcaaggaagcgccacttcgatcccttctccttccctttcttgatttccattttactgttcctctttcgggaatggagagcgacgaggagatagggagagtgccggagctggggctggagccgggcggcgcttcgacgtcggggagggcggccggcggcggcggcggcggggcggagcgcgcgcagtcgtcgacggcgcaggccagcgcgcgccgccgcgggcgcagccccgcggataaggagcacaagcgcctcaaaaggttgctgaggaaccgggtatcagcgcagcaggcaagggagagaaagaaggcatacttgaatgatcttgaggtgaaggtgaaggacttggagaagaagaactcagagttggaagaaagattctccaccctacagaatgagaaccagatgctcagacagatactgaagaatacaactgtgagcagaagagggccagttcttctgaaaatccccaaatcgggtctgcgggaggcggcaccagcgggctgcggaggtttgcgggaggcggagggcgacgagaagtttgtcctcaacgggttcaccgccgcgaatctcagcttcgatggcatggcgacggtgaccccgaacgggctgctcatgttgaccaacggcacgaaccagctcaagggccacgccttcttcccggcgctgctccagttccacaggacgcccaacagcatggcgatgcagtccttctccacggccttcgtcatcggcatcatcagcgcgttcgaggaccagggcagcggcagcccggcggcggcaggtggcagcggcagggcggcataa

SEQ ID NO: 200 - DNA, 1440 bp, Oryza sativa
atgagctcccagagtgttgttgcagtgaagcagattactgctccggacaaaatagtggaaacctgtccatccacaaaacattctgcacataagctgttcgatgttaaaccggattttcaagggttgatagatgacaatttgtcatcctccagtcagtcctcaagcatcaagattgagctgatcagatcatcaagcttgccaaatatactgccgtttcagaaaagaagctctgaacctgaacctgaaagtccactgtctcatgtttcacatcccaatgtttcagagccagtttactcaaattcttcaaccttctgcacaagtttgttttcgtcgtcgtcgatggagacggagccgtgccggcaattgggcactctaccattcctgcctcaccctcctaagtgtgagcagcaggtttcagcagggcactcatcaagctcctccctgctagtacctggtggtgatggtgatattggcaatgctcatgatgaacctgaacagtcagatgatctgaaggatttcctcaatctctctggaggagatgcttctgatggcagcttccatggagaaaacaatgccatggcttttgctgagcagatggagttccagttcttgtctgagcagctagggattgccatcactgacaatgaggagagccctcggttagatgacatatacggcacgccgccgcaactttcatcacttccagtatcatcttgctccaaccagagtgtacagaaagcaggatctcctgtgaaagttcagcttagctcgcctcggtcatcttcgggatccgcgacaactaacaaggcgaggttgaggtggacactggagctccatgagcgttttgtagaggctgtgaacaagctagatggacctgaaaaggcaactcctaaaggtgtgctgaaacttatgaaagtagaaggcctgactatctaccatgtaaagagtcatttgcagaagtatcgcctcgcaaaatatctcccagagactaaggaagacaagaaggcatcctcagaggataagaaatctcagtcaggtagcagtggaaatgattcagtcaaaaagaagaacttacaagtggcagaagctctacgaatgcaaatggaggttcagaaacagcttcatgaacagttagaggtgcaaaggcaactgcagctgcgaatcgaagaacacgcaagatacctgcagagaatactggaagagcagcacaaggtcagcatcagcagcaactccctctcactgaaacccccagccgaatcgcaaccggaatcgccaaaaccaacatcagaaaagaaggaggccgaatccgaagcaggcgccgccacttcagctcagccatcatccgaggataaatcaccagacgcagaatgcaagtcgtcgccgccggtgggtagcaagagagctagggttcatgtcggcgatgagcaccagtgttcatag

SEQ ID NO: 201 - DNA, 1005 bp, Oryza sativa
atgtgtggaggcgccatcctcgccgagttcatcccggcgccgtcgcgcgccgcggcggcgaccaagcgggtgaccgccagccacctgtggccggccggctccaagaacgccgcccgcggcaagagcaagagcaagaggcagcagaggagcttcgccgacgtcgacgacttcgaggccgccttcgagcagttcgacgatgactccgacttcgacgacgcggaggaagaagacgaaggacacttcgtgttcgcgtccaaatctcgtgtcgtcgccgggcacgacgggcgcgcggcggcgagggcggcgagcaagaagaagcgggggcggcacttccgaggcatccggcagcggccatgggggaagtgggcggcggagatccgcgacccgcacaagggcacgcgcgtctggctcggcacgttcaacaccccggaggaggccgcacgcgcctacgacgtcgaggcgcgccgcctccgcggcagcaaggccaaggtcaacttccccgccacgcccgccgccgcgcgcccacgccgcggcaacacgagagccaccgccgtgccaccgccggcgacagcacccgccgccgccccgccgcgcggactgaagcgagaattctcgccgcctgctgagaccgcgctacctttcttcaccaacggcttcgtcgacctgacgaccgccgcggcgccgccaccggccatgatgatgacgagctccttcaccgacagcgtcgccacgtcggagtccggcgggagccccgccaagaaggcgaggtccgacgacgtcgactcgtccgagggcagcgtcggcggcggcagcgacacgctgggtttcaccgacgagctggagttcgacccgttcatgctgttccagctcccctactccgacggctacgagtccatcgacagcctcttcgccgccggcgacgccaacagcgcgaacaccgacatgaacgccggcgtcaacctgtggagcttcgacgacttcccaatcgacggcgcccttttctga

SEQ ID NO: 202 - DNA, 273 bp, Oryza sativa
atggcgcagcaggcaagggcgcagtggccgcagaagcagaacaagctgttcgagcaggcgctggcggtgtacgacaaggagacgcccgaccggtggcacaacatcgcccgcgccgtcggcggcggcaagtcggcggaggacgtcaagcgctactacgagatgctggaggaggacatcaagcacatcgagtccggcaaggtccccttccccgcctaccgctgccccgccgccgccggctaccaggccgaaaggttgaagcatttgaagatctag

SEQ ID NO: 203 - DNA, 1158 bp, Oryza sativa
atgatgatgagtagtagtgccgatcatttcagcaacaataataataatcaggcgatgtacttggagcaagatgaagatttctcccagatgatcatggagctgtgtgattttgatgcgagtagcacgacgcaagctcgccatggcggcgaagcagcagcagcagcagctgggaacgcgagggcggtgctgacgtacctgacatttctggagcagaagatcggccacctccgcggcataatctcgtcgacgccgaacccgccgccgcagatcgtcgccgccgagctcagctgcatcgtcgtgcagctcgtctccatctccaagaacctcgccgcggcgcgccgcggcggcgacgacgcggacgcggacgccaagcacgacggcagcagcgacgccgacgagggcgccgatggcgacggcgagcgcgccccgccgcggggctcctacgaggtggtccagatcgagaaggaggagatcctggcgccgcacgtccacttctgcggcgtgtgcggcaagggcttcaagcgcgacgccaacctgcggatgcacatgcgcggacacggcgaggagtacaagtcggcggccgcgctggccaagcccggcggttcgccgtcgcgttcgccggcggcggcggacgcggcggcgaggaggcgcttctactcctgcccgtacgtggggtgcaagaggaacagggagcacaagagcttccagccgctcaagacgcccacctgcgtcaagaaccattaccggcggagccactgcgacaagagcttcacctgccgccgctgcaacgtcaagaggttctccgtcgtcgccgacctccgcacccacgagaagcactgcggccgcgaccgctgggtctgctcctgcggcacctccttctcccgcaaggacaagctcttcgcccacgtcgccatcttcgacggccactcgccggcgctgccgcccgaggactacgacgacgacgccgcctccggtcagctgccgcacgccgccggcgaggcagtgggcagaacggtggacacgaaccgcttcttctccgatggattgatgatcaaaggcagcatggaggatgagcgaggaagcctctcgccgatggggctcgattactgtgaattcgatggaattgatctctttgcagcagcagcattcgatttttga

SEQ ID NO: 204 - DNA, 2529 bp, Oryza sativa
atggaagagggagacccccagcccagcatctccttggcacgcactccgtcggaaggcgcggcggcggcagtcgacttggatctccttgagcagcttctctcagccgacaacgcctggcttgaagtggcagcaaacacttcacgctcacccaacttctttgctaccccctccaactgcttgacagatgcttcggtcgccaccaccacacctgcaaattcatggtggattcagccgagcggtgcaagcacctcagttcgggaacggtttgaccaagctctagcttacatcagggagacacagagcgacgccgatgtgcttgtgcagctctgggtgccagtcaagggcaacgatggtcagctggtgttgacgacgagcgggcagccattcactctcgatcagaggtccaatagcctcatacagttcagggaggtttcgacaaagtaccagttctctgcagatgttgcttcaggttcctcacctgggctaccagggagggtgttcatcggtaggcttcctgaatggtcaccagacgttcgatacttcaccagctatgagtaccctaggatcaaccatgcacaatatttggatgtccacgggacgatggggctgccggtgtttgagagggggaactactcatgcttaggtgtcatcgagttgatcatgaccaagcagaagctcaacttcacctccgagctcaataccatttgcagtgctctccaggcagttaacctgacaagcacagaagtttcaagcattccgcgcgcaaagcttaacagtgcttcctacaaagatgctttaccagagatactagaagtcctgagagcagcctgcatcacccacaagctaccattagctcagacctgggtcacatgtgctcaacaaggaaagcggggcagtcgccattctgacgagaactacaagtactgcatttccaccattgatgcagcatgctatgtgaatgaaccccggatgcagagcttccacgaggcctgctccgaacaccacctgctacgggggcagggggttgcagggaaagccttcaccacaaaccagccatgcttcctaccagatattggatcctccactaaactggagtacccattgtctcaccatgctaagattttcaatttaaaaggtgcagtggcaatccgattgcgttgcacgcgcacagggattgccgactttgtgctagagttctttctgccaactgactgtgaagtacttgaggagcagaaggcagtgctggactcattatcaggcaccatgagaagtgtttgccaaactttacgtgttgttactgacaaggagatggaggatgaggccatgagagaaatgaatgagctgaactcatttagtcctcggggcaagaacaaagttgaggagttatcctttggagacaacacaagaggggatagagaggaggcatcttggacaaccttagtagggacttcacagaaaggatcagatttagctgaattgcatacacatggaatgttatcacatggagggcatggttcatctcaagctggtgatcaaacaagtaaagaaggtagcaaagtgaaaaggcgtacaaagacggagaagaccgtgagcttgcaggtccttcggcagtactttgctgggagcctgaaggatgcagcaaagagccttggagtgtgcccaaccaccctgaaaagaatatgcaggcagcatggcataaaccgctggccatcacggaagataaagaaagtagaccattctctaaggaaactgcagcaaatcattgattcagttcatggagcagagacagctttccagcttaacaccctctacaaggacctcacaaacacctctgtatcatctgacaacaatttgtcaggaagtgtcacagttcctctggctaaccagaacaatctagactttgaaatgcaccaacaccacaggttaagcagcaatattccatcgacttcactctcacactcatcatgcagccaaagttccgattcaagcccttcctgcagtggaggagcaacaaaacattcaccccaggttggagctgatcaggtgaggtcaggatgtcttccacaacatagccctgtccagactctgcaaacagaagctgcttcaataaatgaacatttctcaggtcaggaagcaccaatagatctcttacaggatgttgctgaaaaggcaaatggtgaacagcacatgtctcaaagtccatcatcccccaagcagactgcaaatgtaggtatgagagtaaaggtcacttttggctcagaaaaggtgaggttcagattgaaacctgagtgtgactttcaagaactgaagcaggagatatcaaaacgtctgagtatagcagacatgaattccttgattgtaaagtatttggatgacgattcagaatgggtcttgatgacatgtgatgcagatttacacgagtgttttcatgtttataaactagcagatatccaaacaatcaagatttcagttcatctggctgctagtccaacaacaaggatcaccattggtcacactggtttctcatga

SEQ ID NO: 205 - DNA, 1077 bp, Oryza sativa
atggacccggcggcggcgggcattgtgaaggaggagatgctggagtcgcagcagcagcagcggcaggaggatggcggggcggcgccgcggccgatggaggggctgcacgaggttgggccgccgccgttcctgacgaagacgtacgacctggtggaggacccggccaccgacggcgtcgtgtcgtggagccgcgcgggcaacagcttcgtcgtctgggacccgcacgtcttcgccgacctcctcctcccgcgcctcttcaagcacaacaacttctccagcttcgtccggcagctcaacacctacggcttcagaaaggtcgatcctgataggtgggagtttgcaaatgagggttttctcaggggccaaaggcatctcctgaaaacgataaagagaaggaagcccccgtccaatgcacctccgtcacaacaacagtccctcacatcttgtctggaagttggtgagtttggattcgaggaagaaattgacaggctgaagcgtgataagaacatcttgatcacagaggtagtaaagctaaggcaggagcagcaggccactaaagatcatgtgaaagccatggaagataggctacgagccgctgagcagaaacaggtccagatgatggggttcttggcaagagcaatgcgcaacccagagttcttccagcagttggcacagcagaaagagaagaggaaggagcttgaggatgccatctcgaagaaaagaaggcggcctatagacaatgttccattctatgaccctggggaaacaagtcagactgagcaacttgattcgccgtatttgtttgattcaggtgtgcttaatgagttaagtgaacctggaatccctgagctggagaatctcgcagtgaacattcaggatctggggaagggtaaagtagatgaagagaggcagaatcaaactaatggtcaggcagagctcggagatgacttctgggcagagctgttggttgaagatttcacaggcaaggaggagcagtcagagttggatggcaaaattgacggcatcgacgaactggctcaacagttggggtatctgagctctactagtccaaaatag

SEQ ID NO: 206 - DNA, 1188 bp, Oryza sativa
atgaattataattttggtggcaacgtgttcgaccaggaggttggagttggaggcgaaggaggaggaggaggagaggggagcggctgcccatgggcgcggccgtgcgacgggtgccgcgcggcgccgagcgtggtgtactgccgcgcggacgcggcgtacctgtgcgcgtcgtgcgacgcgcgggtgcacgcggccaaccgcgtggcgtcccgccacgagcgcgtgcgggtgtgcgaggcctgcgagcgcgccccggccgcgctcgcgtgccgcgccgacgccgccgcgctgtgcgtggcgtgcgacgtgcaggtgcactccgcgaacccgctcccggccatcaccatcccggccacctccgtcctcgctgaggcggtggtggccaccgccaccgtcctcggcgacaaggacgaggaggtggactcttggcttctcctctccaaagattccgacaacaacaacaacaataacaacaacaacgacaacgacaataacgacaacaacaacagcaacagcagcaacaacggcatgtattttggtgaagtcgatgagtactttgatcttgtcgggtacaattcgtactacgacaaccgcatcgaaaacaaccaagatcggcagtatgggatgcatgaacagcaagagcagcagcagcagcagcaggagatgcaaaaggagtttgcagagaaggaagggagcgagtgtgtggtaccttcacagatcacaatgctgagtgagcagcagcatagtggttatggagttgtgggagcagaccaggccgcctccatgaccgccggcgtcagtgcttacacagattccatcagcaacagcatatctttctcatcaatggaggcgggtatagtaccagacagcacggtgatagatatgccaaattccagaatcctgacacctgctggagcaatcaatctcttctcaggtccctcgcttcagatgtcccttcacttcagctccatggacagggaggccagggtgctcaggtacagggagaagaagaaggccaggaagtttgagaagacaatacgttatgaaacaagaaaggcgtatgcagaggcacgaccccggatcaagggccgtttcgccaagagatcagatgtgcagatcgaagtggaccagatgttctccactgcagctctatctgacggtagctatggtactgttccatggttctga

SEQ ID NO: 207 - DNA, 702 bp, Oryza sativa
atggtgcgggggaggacggagctgaagcggattgagaacccgacgagccggcaggtgaccttctccaagcgccggaatggcctcctcaagaaggcgttcgagctctccgtcctctgcgacgccgaggtcgccctcatcgtcttctccccccgcggccgcctctacgagttcgccagcgcccccagcctacagaaaaccatcgaccgctataaagcatacacaaaggatcatgtcaacaataagacaattcaacaagatatccagcaagtcaaagatgatactttaggcttggccaagaaacttgaagctcttgatgagtccagacggaaaatattgggagaaaatttagaaggattctctattgaagaactgcgtggtctagaaatgaaacttgagaagagcctccacaagataagactaaagaagaccgagcttctggagcagcagatagccaagctgaaagagaaggagcggactttgcttaaagacaacgaaaatttacgcggaaagcatcgcaaccttgaggctgcggcgctggtggctaaccacatgacgacgacgacggcgccggcggcgtggccgcgggacgtgcctatgacgagcagcacagccggcgccgccgacgccatggacgtggagactgatctgtacattggattgcccggcactgagcgctcctccaaccggtcggagacaggttga

SEQ ID NO: 208 - DNA, 2100 bp, Oryza sativa
atggggattgacctgaacacggtggaggaggaagcggaggagggggcggcggcggcggtgtgcggggagctgtggcacgcgtgcgcggggccaggggtggcgctgccgcggcgcggcagcgcgctcgtgtacctgccgcaggcgcacctcgccgcggacggcggcggcggcgaggtgccgcctgccggcgccgcggccgtgcccccgcacgtcgcgtgccgcgtcgtcggcgtcgagctgcgcgcggacgcggcgacggacgaggtgtacgcgcggctcgcgttggtggcggagggcgagatgttgcagcggaacttccgcgagggtggaggtgaagatggtgcaggggagatggagggttgtgatgcagaaaagaagccccggatgccacacatgttctgcaaaactctcacagcatctgatacaagcacccatggaggtttctctgttcctcgccgggctgcagaggactgtttcccacctttggtgatacacttaaaagaaaaacttgtaacttttaatgactataagacagttagaccttctcaagagctgattgccgtggacttacatggcacacaatggaagttcaggcatatttatagaggccagcctcgtaggcatcttctaacgattggatggagctcatttgtcaataggaaaaaactagtctcaggggatgctgtcttgtttcttagaggtgatgatggccaactaagattgggtgtaaggagagcagttcaacttagaaatgaggccctctttgaacctgtcaacagcagcgattcaaagctacgcattctatcttctgttgccagttccttggaaaataaaagtgttttccacatttgtttcaacccaaggagtggtgcgtcagaattcattgtaccgtattggagattattgaagagcctgaaccatccattttccattggaatgaggttcagagtttgctatgagagtgaagatgctaatgagaggtccgctggattaatttcaggcattagtgaagttgaccccataagatggcctggatcaagatggaaatgcctactggtaagatgggatgatagtacagatagcagccaccaaaacagagtttctccatgggagatcgagagagttggtggcagtgtctcggttacccattccttgtcatctgggtctaagcgaaccaaattgcactttcctcaaggcagtttggatactccatttcttaatggaaatggtcacccggactccatgggaactgaaaatttccacagggtcttgcaaggtcaagaatttaggggttctaggtcccatggtgttgtatgctctgaatcacctggtgtaccaaactttcaatctcctgacaataggagattttctgctgatatgcggggctacatgatgccagcaagtgggcccccacagcggaacacagagtttacttatcagcccataggcttcagtgagtctcttggattcccagaggtcttgcaaggtcaagaaatgtcacaagtagttcctttgttccgaggagctacttttggcgctcgtacacagaatgacagagttgtctctgctaattctgtgcatagatcagctgcacagagtggattgctagcttcaactctagggcatcccatctcgcagtttactctgtcatcgtcaaaggtatcttctccctcgtcggttctgatgtttaaccaagcgacagctccaaatcatgaaacagtaagcggaaccaacaacaaaggtatgcatgtcagccagtttgcttcccaggagatgctctcagaaactgtaacctggcccggcacacaacgtcaaacgccgagcgaaatcacgagcaaccagttcgccctggcgagaatcccagctcctccaagcggagctgaatccggattgcccaagagggatgccgggagaagcagctgcagactgtttggcttctccctgacaggcaacatgctgggagaagatggagaaggcctagatgatggagccattgaagctggttgcgaaaacccgcccgtgctggagctgtttgggcacagccattctactcccggtgctcttcatgccctgtgtgctgctgctcccctgggaatgtga

SEQ ID NO: 209 - DNA, 933 bp, Oryza sativa
atggacgccgagatggccatgggcgagagcttcgcctactactgggagacgcagcgctaccttgagtccgaggagctcgacagcatgtacctgccgacgcaggatgactccaactacgagtcgagctcgccggacgggtcgcactcgtcgtcggcgccggcgccggcggccgtgggcggggacgcagccgccgcggtggcgggtagcggtggcgggatgacgacgatgatgatgggcggcggcggcggcggtggcgacgacgccggtggcgcgaacaagaacatcctcatggagcgcgaccgccgccgcaagctcaacgagaagctctacgcgctccgcagtgtcgtgcccaacatcaccaagatggacaaggcgtcgatcatcaaggacgcgatcgagtacatccagcgcctgcaggcggaggagcagcagatgctccgggaggtcgccgcgctcgagtccgccgccgcggcgagcgccgccccggccgcggcgaacccgttcgccggcctcggcgccgacgaggaacacgagtacggccaccaccacccctcgtcgtcgtcggagcggacgaagaaggtgaagcgggcgctgtccgtgtcgtccatcagcgacgccctgctcgccgcggcggcgccggcgccgccggtggagatccaggagctgcgcgtgtcggaggtgggcgacagggtgctggtggtgagcgtgacgtgcagcaagcgccgcgacgccatggcccgggtgtgccgcgccctcgaggagctccgcctccgcgtcatcaccgccaacatcacctccgtcgccggctgcctcatgcacaccctcttcgtcgaggtagatcacatggatagtgtccaaatgaagcagatggtggaggctgctctctcccagcttgtggcgaccggcagtccgttgagctccatgagctattag

SEQ ID NO: 210 - DNA, 699 bp, Oryza sativa
atgagctgcaacgggtgccgcgtgctgcggaaggggtgcagcgacgcgtgcgtgctgcggccgagcatcgagtggatcgacggcgcgcagccgcaggccaacgccaccgtcttcgtcgccaagttcttcggccgcgccggcctcgtcgcctccctcgccgccgtccctctccaccatcgtccagcgctgttccggtcgcttctgtacgaggcgtgcgggcggacgataaacccggtgagcggcgccatcgggctcatgtggacgggcaactgggacctctgccaggccgccgccgacgccgtcctccgcggcgactccctccgcgccctctcggccgtgccagccgccttcaccgaccgcgacatggccggcctctacggcaacgtcggcgccgccgccgggacctcctcctcctcgcccgacaacgacaactcctccgcctccgccgcgccccggaggaagcggcccaggaataacggcgccggcgccggcgtcggtcagcagcagctgccgcacgcggtggctgcggtgctccagtcctgcgagctggacctctgcctcacgcccgtctcaccgccggccgtgcagctggtgggtgggggcggcggcgcgtcggacgagcactcgacgacgacgtgcgaggaagccagcgacggggatggcgccggggcgcccacgctgctgaacctcttcagctga

SEQ ID NO: 211 - DNA, 1527 bp, Oryza sativa
atgggactgcaagggaataaggcgacgcacgacttcctctcgctgtacgccgccgccgccaccgccacggactactcgccgctcccgcgccacccggactccaagccctcggcgccggcgccgccgcccgctcaagatttcttcctcaagacacacgacttcctgccgcaggtagagaagagagccgaccagacaccaccgccgccgccgccgccgccgccccacgccgcggtcaccgccgagaagcagctgctccaccagcacgcgttggccgccgccggcgcgttcaccatcaaccacgccgtggccgcggccgccaccgccgtcaagcaggagccgcccttcgcgccgtggtgccagcccgtcgccgccgtagatccccgaggtcaccagtggtcgctccccttcgccgcgcgcgccgtcgccgtcgcctcctccaggccgcagcagcagcagcagcagccaccgccgccggagaggaagggtggcggtggattcatggacgccggctccagatccagtggcggcgcgggcttcgacgacgacgacggccatgccgcgcgccgcgaggtctcctcctcgctgaaagagctcacggtcagggtggaagggaaaggtgggagctgcagcggcagcgctggcacggatcagatgccgaacacgccgcgctcgaagcactccgccaccgagcagcgcaggcgcagcaaaatcaacgacagatttcaacttcttagagacttattgcctcataatgatcaaaagagagacaaagcatcatttctcttagaggttattgaatacatacggtttttacaagagaaagtacaaaagtatgaggtttcatacccggagtggaaccaagaaaatgcaaaggttgtgccatggacaaacatctatttccgttcttcctggaaaaatgcgcagaacaaaggccaagttcctgcagatcattcacctgaccctccagaacttctgaaaaatggttccccctatatgttcccttttacagggaactctgataataacaatgcagttgaaactgcagctgcttcaggtgcacaggatcaggcagaaactgatccaatgagtcgtgtgtcttacagatcagtggacactcccagtcccaataatgttgcagacaaagttacatctcagccacacgctcaactggtgagaccatcacctgcagagaatcacacagtaaactgcgacaagttaaataattctgaccttgccatcgatgagggaacaatcagtctatcaagccaatattcccaagagttgcttaacaagttgaatcatgccctggaaaactcgggtatagatttgtcccaagccagcatctccgtgcaaataaatcttggcaagagggctatgaagagatctactcctgctgcaacctccacttctaaggagctcactgatccggcatctaatagtcaagcaatgggccgtcagcttaggttgggtgatggcgctgaagaacatcgacaagcctcaaagcgacacaaatcagataacagctga

SEQ ID NO: 212 - DNA, 786 bp, Oryza sativa
atggctgacctgaccgagcatccgtcgccgactgctcctcctcaagtgcaaacagctggcctgccggcggcggcttctccgggtcctgcctcgcctcattcaccgtcggagcaaggggacaagacggcgcccggggcagccacggcgtcgacgatgacgacggcgagctcgggcgagccgtcgccacggtcctcggggaagcacgccttctaccggggcatccggtgcaggagcggcaaatgggtctcggagatccgcgagccgcgcaaggcgcgccgcatatggctcgggacgtacccgaccgccgagatggccgccgcggcctacgacgtggccgcgcgcgcgctccgcggggccgacgcggtgctcaatttcccgggcgccaccgcctcccgccctgtcccggcgtccgcatccccggccgacatacgcgccgcggcggccgcagcagccgcggccgccgcgcaccttgagcggccgcacggccccaccggcactgcctatcctgccaccgccgcagcggagcaccaccagcagcagcagcagcaacagtacggcagtggcagtccggccgccgacgacgtctcaggctacccgccgatggagggagggattggcaatgacgatttcatggacgaagaagccatcttcgagctgcctcagctgctgcgcaacatggcggctggcatgatgatgagcccgccgaggctgagccccaccacctccgacgtgtcgccggagccgtcggaggccggcgagagcctgtggagctaccgtgatccctag

SEQ ID NO: 213 - DNA, 246 bp, Medicago truncatula
atggcctcaagttcccttagcaaacacaagccttgtgattcaatttggactccaaaacaaaacaagttgtttgaaaaagcacttgcaaaatttgataaggatacccctgaccgttggcaaaatgtagcaaaagccgttggtggtaaatcagttgaggaagttaagagacattatgagctactcttggaggatctcaaacacattgagtctggtcatgttcctattccaaactacaaatccacgtga

SEQ ID NO: 214 - DNA, 276 bp, Medicago truncatula
atggcttcaagttcgaattggacaacaaagcagaacaaaagatttgagaatgcgttggcaatgttggacaaggacactcctgatctttggcagaaggtggctagagctgtgggagggaagactgttgaagaagtgaaaaggcattatgaggaccttgttgaagatgttaggcagatcgaggaaggccatgttcccctgcctaattacacaaataatgttggttacagttacataatggatcaagataaaaggatgaaggctctaagtctccactaa

SEQ ID NO: 215 - DNA, 282 bp, Medicago truncatula
atgtcctcaagttcagcttggacaacaaagcagaacaaaagatttgagaatgctttggccatctatgacaaggacaccccagataggtggcagaagctagcaagggctgttggagggaagacagttgaggaagtgaaaaggcattatgagatgttagttgaagatttgaagcaaattgaggaaggtcatgttcctttgcccaaatacagaaatgctgcaacaattaaaggttacaattacagtgacgaagaacaaaggttgaaatatctaagccttcagtga

SEQ ID NO: 216 - DNA, 1239 bp, Medicago truncatula
atggatagggtattctcagtggacgaaatccccgaccatctatggtcaccgcagattcatgtctccggcagcgccggcgatgaatcctccaagatgagtcgcagcgcttccgaatgggcgttccaacgctttttgcaagaagctgcctcaccttctccttcttcttcgtctgttgctgataacaccggttttgccgatgctgcagcaaaagacggtgccgttttgcccaatggaccacctccggtggccgtggattccgatgaatatcgggcttttctgaagagtaagctgaatctcgcctgtgctgccgttgccatgaccaggggatctttgactaaatctcaagacctagccacttttcctgagaatggaccacagtcctctaatgctactcaagttggatctcagcccatttctgaaggatctggtccttctggaaacgatccacctatattacaagataaggatgccaaggtaccacctgcggtcccttccataccacatgtgcagaaaaaaaccattgttgcaattaggccatcaacaagtggatcatcaagagaacagtctgatgatgacgaagccgagggagagacatatatgattgacagcacagaccctactgacgtaaaacgagtaaggaggatgctttccaatagagagtcagccagacgctcaagaagaagaaagcaggctcatttaactgagttggaaacacaggtttcacaattaagaggtgaaaattctaccttggtaaagcgtcttactgatgtgaaccaaaagtacactgattctgctgttgacaacagagtactgaaagctgatgttgaaacgttaagagcaaaggtaaagatggctgaagagactgtgaaaagagttactggattgaacccattgtttcatgtcatgcctgatatgtcgtcaatgccagcatttgatggaagcccctcagacaatttagctgatgcagctgttcctgtgcaagacgatccacatcatcatttctatcaaccaacatctattaatcctatgccgtgtcatgatatgagagtcagcaatgggttgggagaaatttcttcaattgaaaatgtgcagccaaacaatgcagcagttgtaggtgggaacaagatgggtcaaacagctcctccgttgcaccgggtggctagcttggaacatcttcagaagcggattcgtggtggtggtgtcgattcttgtggacctccttctaatggagagcagtaa

SEQ ID NO: 217 - DNA, 1254 bp, Medicago truncatula
atgggttgtgttgttcctgcagaacttagtttagatttaagaccaactttcgttcccaaaaccatcgctaatttcctctttcacctttccacaatccaaaccacctccgataaactctctaaactccatgatttcctctccagactcgaagatgaactcaataagatcgatgctttcaaacgtgaactacctctctccatgctcctcttaaacgacgcaattttggttttgaaggaggaattggaaaaatgtacaagtaaaaattctgtgccagttttggaagagtttattcctttgaagaaagagattgatcaaagtgaagagaataaaaataatgatagagacaagaacaacaacaatgaatgcagcaaagataagaagaattggatgagttctgttcagttatggaataacaacacaacaacttctaataataatgtctctgatcatcatcatcatcataaacttaataaattagaaacaaccaagaaaagggaggaaggacaatctgtgactgtagctgaagacctttttcaatcttgtagtagtaatagaaatggaggaagtgcttttatgcctttttcagcgtattcttctgttcctgtgacaacagtgacattatcagcgcctaaagaagagaaggaagaacctgttaggaataggctctcttttctgactcctgaggtgaagagtttgagagaaggatttggttcgaggggatcaagaagcagttctaacagggcagtttcgtcgtcgtctcctcctaccgtgcagccgagtttgcgtgctgcgccgcttcagccgcagcagacttctaggaaacagaggagatgctggtcaccggaattgcaccggagatttgttaatgcgttgcagaagcttggaggttctcaagcagcaactccaaagcaaattagagaactcatgcaagttgatggcctgactaatgatgaagtgaagagccatttgcaaaaataccgacttcatacgcggagagttccagctgcaagtggtactgatcagtctgttgtagttcttggaggtttatggatgcctcaagaacattacaatgactcttccaaaggtagcagtacggcgtctggttctccacagagtccacttcatttagctacaggatcccggggagggacatcaccaactgaaggtgatagcatggaagatgacgatgatgaaaaatccgagagttatagctggaaaagtcatattcacagacatggaaaagttggtgtatag

SEQ ID NO: 218 - DNA, 873 bp, Medicago truncatula
atggcttctaaactctgtgactcatgcaaatccgccaccgcaactctctactgccgccctgactccgccttcctctgcggcgcttgtgactccaaagtccacgccgctaacaaactcgcctcccgtcatcctcgcgtcactctctgtgaagtctgcgaacaagcacctgcacatgtcacgtgtaaagccgatgcagcttctctttgcatcacctgtgaccgtgacatccacactgctaatcctctcgccgcacgtcacgagcgtgttcccgttactccgttcttcgaatccaacacttctcactctgttaaatcgcttaacaacaacaataacaactacgatgctgttaaagatgaagctgaagctgcttcgtggttgatctctgatccgaaagcagatctcaactcatctccttatcttttctctgattccgaagctattccgtttatggatcttgattacggtgtaattgaacataaaaacgacggtgttgttcccgttcacggtaacttcgatccttttgtttctgcttacaagaacaacaacgtgcacttgcatacagagttagaaacaccgtcacagtcgcagattagtcagagtgtttcatcttcctcgatggacgttggagttgttcctgacgcgaacaccgtgccggagatatcaaactgtggttacgggacggtggcggtggatcgtgaagctagggttatgaggtacagggagaagaggaagaatcgaagattcgagaagacaattcgttatgcttctcgtaaagcttatgcggaaactaggcctaggattaaagggaggtttgcgaaacgcactgatgcagttgattccatttctggatacggcgtcgttcccacttgttga

SEQ ID NO: 219 - DNA, 1239 bp, Medicago truncatula; identical to SEQ ID NO: 216

SEQ ID NO: 220 - DNA, 597 bp, Medicago truncatula
atgtatacaagtaacaacggggaggggcggttagcggcgagttgcccaaaaaaaccagcagggaggaagaagtttaaggagactcgccacccggtgtatagaggtgtgaggaagaggaacttagataaatgggtgtgtgaaatgagggaaccaaataagaagactaggatttggctagggacttttgcaacagccgagatggctgcccgtgcacacgacgttgcagcaattgcattgaggggccgctacgcctgtctcaactttgcagactcggcgtggaagcttcctattcctgcctccgctgaagcaaaagacattcaaagggcagctggagaagccgctgaggctttcagaccagacaagactttaatgactactggcattgacacggttgtggctgttgtcgttgcggtggaagaagaggaagaagtgttgaatatgttttgtgtggaagtcgaaaaagaagaggaagtgttgaatatgcaagagttgtggaaaaatatggcactaatgtcccctacacatagttttgagcatgagtatgaagattttgatgtacaatttcaagatgaagaggtatcgctatggaacttctga

SEQ ID NO: 221 - DNA, 726 bp, Medicago truncatula
atggaatatagccaatatagtagttattcagcagaagcaggagaagaagaaacatacacaactagtagcatatcttccatgagaaagaagaaaaacaagaatacaaagaggtttactgatgaacaaatcaaatcattggaaactatgtttgaaactgagacaagacttgaaccaagaaagaagttgcagttagctagagagcttggattgcagccaagacaagttgctatatggtttcaaaacaaaagagctagatggaaatcaaagcaacttgaaagagaatacaacaaacttcaaaatagttacaataatttggcttcaaagtttgaatctatgaagaaggaaagacaaacattactaatacagttgcagaagctgaatgatctaatacaaaagccaatagagcaaagtcagagtagttcacaagttaaagaagcaaagagcatggaaagtgcatcagaaaatggaggaagaaacaaatgtgaggctgaggtgaaaccaagtccttcaatggaaagatcagaacatgtacttgatgttctatcagatgatgacacaagcataaaggttgaatactttggtttagaagatgaaactggtcttatgaattttgctgaacatgctgatggttctttaacatcaccagaagattggagtgcttttgaatcaaatgatttattaggccaatcaagttgtgattatcaatggtgggacttttggtcttga

SEQ ID NO: 222 - DNA, 1038 bp, Medicago truncatula
atgggaatggagcaaaacaacgtgattgcaccgttcattatgaagacataccacatggttaatgaaccaaacacagataaccttatcaagtggggcccatctaacaatagtttcattgttcttgatcccttagaattttctcactctcttcttcctcttttcttcaaacacaacaatttctctagctttgttcgtcaactcaacacttatggtttcagaaaagtggatccggatagatgggaatttgcgaatgagtggtttctaagaggacaaaaacacttgttgaagaacatagttaggaagaaacatgttggtggtattggaaatggaaggaataataattgttataacaataataattattttaatgaggtgaagtttgaagatttagaagaagatgaagctatggtgacggaaataatgaagttgaaagaagaacaaagaaatttagaagaagagcttcaaggaatgaacaaaagattagaaacaactgagaaaagaccacaacaaatgatggcgtttttatgtaatgtcgttgaagatcctcaaattttgtctagaatactcaatgaaagggagagtaaaaaatttgttgataagaagaaacgacggttgatatctccggtggttacggcggcggtgacaacgtcgacttcctcggagtcgtcgggcatggcgatggcgaattcggtgaagatggagtttgaggaagatgaggtaacggttggtaataacatgatgtcatcgtcaacggaggttggttttgaaattgattatttgcaccgtgtgccaccgcgggaggtggctccggtgggtggttggttggggcagacggagtttggacaaatggtttatgggcgtgattgtggagtttcacggatgccggagctgtctccggtgccggcgccgatgacgtggggtgagaatagaagtgatagtagtagtaaaaaggggggtgagggaaatttcaatgaaatggcggcggagaatagtaagttgccaccttatcctttttcgttgttagaaggtggcttttag

SEQ ID NO: 223 - DNA, 972 bp, Medicago truncatula
atggaaggagtagaaacagggtcacatgaaaggaatgaacttgttcgagctagacatgatgtttctgaaactgggtctaaacccttaaagaatttgaatggtcaaatctgtcaaatatgcggtgatactgttggattaacagccaccggcgaagtctttgttgcttgtcacgagtgttccttcccactttgttatccttgttatgaatacgaatggaaaaatgtgatccaatcatgtccacaatgcaagactagattcaaaagtcacaaagatgatcctcgagtgaaaggaggtgatgatgaagatgatgtcgacgatttaaggaatgaggtcaagtatggtcaaggaaataatgctaaggcaggatggcaatgggatgaagatgctgacctctcttcatcttctggacatgattctcaattacaaaatccccatctcacaaatggacaactgatgtctggcgacattccatgtgctacttctgatactcaatctgtgcaaactacatcaggtcctttgggtcaatccgaaaatgttcactcacgtgcctatgttgatccaaagcaaccaggtcttgagagtgacgaggagatcagaagagtgccagatatgggaggtgaatctgccggaacatcagcctctcgtaaaggcactggttcaactgctggtcctgaacgtgttcagggggctggagagggtcaaaagaagagaggtagaagcccagccgacaaagaaagcaaacggctaaagaggctactgaggaacagagtttcagctcagcaagcaagggagaggaaaaaggcatacttgagtgacttggaaacaagagtcaatgacttagagaagaagaattcagagcttaaagaaaaactttcaactttgcagaatgaaaatcaaatgctgagacaaatattgaagaacacaacagcaagcaggagaggaagcaatggtggttccaacactgctgaatga

SEQ ID NO: 224 - DNA, 840 bp, Medicago truncatula
atgtatcatgcaaagaagtttccggaggagacgatgatgctacataaatctcaaggtggtggtggtggtggtggtgaacagtttgcaaatggtgggggtttgaatggatctgctgtgaaaaatgttcaacctgctggaggaggtgggaagcagcgtttgcgttggacgtcggatcttcatgaccgttttgtcgatgctattacgcagcttggtggaccagatagagcaacacccaaaggtgttctgagagtgatgggcgtgcctggactgaccatttatcatgttaaaagccatttacagaagtatcgcctggcgaagtacttgcctgaatcaccaggtgatggtaaagattctaaagatgagaaaaggaattctggagacagcatttctggcgctgattcttccccgggattgcaaatcaatgacgcactacgaatgcagatggaggttcaaaaacgtctgcatgaacagcttgaggttcaaaagcaattacaaatgagaattgaagcccagggtaaatacttgcagaagatcatagaggaacagcagaaattaggcagtaccttggcagcatcggaaacacttccgttgtcccatgataagcaaaaccagcccctatcagagccttctgggtctagtgatgcccttgcagacactttttctccccataaaaaacagagaattgatgaaggttcaaaggatggcactgcaccccaagttacaataaagactgctcagaagaatgattgtaatgttggtcctttggatccaaacttgtatgaagatgatgctggctatggatttgatttggagacagaaaatgacgacggcaatgagtga

SEQ ID NO: 225 - DNA, 1149 bp, Medicago truncatula
atgtgtggtggagctattatctccgacttcattccagctgcggcggcggtgggtggttcccgccgtgtcacagcggatatcctctggccgaatttgaggaggaaaccaagttcaaggaaaccttttttgcttgacgatgatttcgaggctgggttcagagagtttaaggatgattctgattttgatgaagacgaggatgaagatgatgatgaagggttgttggtcggtgtcaaaggtttcacctttgcttccaataagaacaacaaatcttctaagtcctttgttcgtggatcaagtgctgcaaaatctgttgctttgaattcaaaccagcaagctgaaaaggattcgaagagaaagagaaagaatcagtataggggtatccgtcaacgtccatggggaaaatgggcagctgagatccgtgacccaaggaaaggagtccgtgtctggctcggaactttcaacactgctgaagaagctgcaagagcttatgatgctgaagctaggagaatccgtggcaataaagccaaggtgaatttccctgaagaggctccggttgcttcctcaaaacgtctcaagaaaaatcctgagatgcagctgttgaatgataatctaaactctttcaagccgaacggaaaccaaatgttcaatttcagtgaaaatatggagaactactattctcctatggatcaggtggaacagaaaccattggttaacaaccaatatgctgacatcggagccttctccggaaacggagtgcagcttacatctgctgatgttaatgcttatttcagttcagagcattcaagcaattcatttgattattctgatctatgttggggtgaacaaggcgcaaaaacacctgagatttcgtctgtgttttctgctgctgctcctatggaaggtgaatctcagaagaacatgctgtctgacaacactcaggatatgctgcctatgcaaaatgattctgcaaagaccctctctgaagagctcgcagatatcgaatcccagctgaagttcttcgagaacgataactggagtgatgcttcattggctgctttgcttagtggagatacaactcaggatggtggaaacacaatgaacctttggaacttcgatgacctgccttccatcgcaggcggagttttctaa

SEQ ID NO: 226 - DNA, 282 bp, Medicago truncatula; identical to SEQ ID NO: 215

SEQ ID NO: 227 - DNA, 885 bp, Medicago truncatula
atgcaaactcatcatcagtactactcattctcttgtgagagtgcctcttgcagcagcagcttagatgatgaagattccatcttcctctctcttgctcctcctggccaccaaatacctcccaaactcacaccccctcatcccactattagtactactatccctcccttgcatcaaatacctatttctactactacctctctccaccatcaccatacttgtgctgtaaatgtagcacttaatgccctaattaatccaactttcacttcaaaaccatctcacactcccattattcctcaatattggatcccttctcctgctcaaatccttgttggtcctacccagttttcttgcactgtttgcaacaaaaccttcaaccgtttcaacaacatgcagatgcatatgtggggacatggatctcaatataggaaaggaccggagtctctaaaagggccaaaaccagcatcatcttcatcaatgctgaaactaccatgttactgttgtgctgagggttgcagaaacaatataaactatccaagggcaagaccactgaaagatttcagaacccttcaaacacactacaagagaaagcacggagggaaatcattcgagtgcagaaagtgtaggaagacatttgctgtgagaggagattggaggactcatgagaagaattgtgggaagctttggttttgtatctgtggttctgatttcaaacacaaaagatcgctaaaagaccatgttcgtgcgtttggtaatggccatgctcctcacacattggaatctttgagttttgatggacataaagtaaatgaaaattacatggaagaagaagaaagtggaagtgaagatgatgacaatgacagtgaagttgtttttagtttgaattaa

SEQ ID NO: 228 - DNA, 2730 bp, Medicago truncatula
atgggagatggtgctgcagtgacatcatctgcaaccaataccatgatggaagctccaccacaagatgaaaatttaatggattttgattacatgagtgaacttttgttggatggttgttggttggaagcttctgctgatggatctgagttcttgctgcaaagttctcctttttccaatccaatctttgacccttcattctcttggcctgtcttggagaacaacgagcaacccggcaatgatgttcggcatgagtctcaagatgttcctcttggtactgagcaggaaagccggattatagttaataatgctggtagtagcgacctgcagcagtgtgagtttaagactcatttgggtgaaggggttagtaggttgtggattccaccgacgcctaatccaggacctggtggatcttccataacagaaaagctgataagggccctcaagtggatcaaagatttcaataggaacaaagatatgcttatacaaatatgggtgccggttaatagaggggatgataggccaattctgagagctaatgatcttcctttttcacttgaatcaaggtctttaaaccttgcaaagtaccgagaaatctctgtgagatatcagttttctgcagaggtggaggactcaaaggagttggtggcgggtttgcctggtcgagtttatagggataagattcctgagtggacacctgatgttcgattcttcaggagtgatgagtatccacgagttgaccatgctcaagagtgtgatgtacacggaacattagcggttccagtgtttgaacaagggagcaggacatgtttgggagttattgaagtggtgatgacgacacaacagagcaactatggccgtgaacttgagactgtttgcaaagcgctagaggttgttgatctcagcagctctggacattcaagtcctcagaatgtgaaggcatgtgtcaagtcctatgaaaccgcactacccgagattcaagaggttttgagatctgcatgtgaaatgcacaaattacctttagctcagacgtgggtctcttgcatccaacagggaaaagatggctgccggcactctgatgataattacacacactgtatatctccggtggagtatgcttgctatgttggtgattcctcggtcaggtttttccatgaggcttgcatggagcatcacttattaataggtcaaggtgttgccgggggtgcttttatgacaaatcaaccgtgcttctcaaccgacataacttctttaagcaagacagactatccactgtctcatcatgccaggttgtttggattgcgtgctgcagttgccattcgactccgaagcatctatagtatctcagacgactatgttcttgagttcttcttgcctgtagattgcaatgacggtgaagaacagaaaaagatgctcacatcattgtccatgattattcaaagggtttgccgcagcttgcgagttataacagataaggaattggagaaaaataacttatcatctaatgaagtgatggccgttgctgatattggatttgctaccgatgcagttcagtcgggactccaacacaagaggatggctgtctcattggacggcgaagaaaagtttaatgaaacaatgtctagcaagttctcggaacaaaggcggcaacaagaaagtcttactttaagaggagatgctgactgtggtagggagtgttctccttctgtcgagggtaacttcttgtcaagtttgggagtaaatagaacaggagagaaaagacgggccaaggcagagaaaaccatcactcttcaagtccttagacaatatttcgctggaagtctaaaagatgctgcaaagaatattggcgtctgtactacaactctgaaaaggatatgcaggcaacatggtataaagcgttggccttctcggaagataaaaaaggttggtcattccttgcagaaacttcaactcgtcattgactcggttcaaggtgcctctgggtcatttcaaattgattccttctattcaaaattctcggatctatcgtctccaaatttatcaggaagcaccctaatctcaactctgaatcaagttgataatccagtctcattaagcatacagccagatcccgactcgttgagtccagaaggtgcatcgaaatcaccttcctcttcatgtagtcagagttcctattcaagccattcctgttccagcttgtcagagcaacaacaccacacaaacaatgttgctgctggcaacaaagattcattggttggtgaagactctgtcgatgttgtgttgaagagaatcagaagtgaagcagaacttaaaagcctgattccagataataaatcaaaactcatgccaagatcacaaagccaggaaacacttggtgaacacccgaaaaccgagtatcgcaagtccttattaaaaaccactcgcaaagcgtctcaaaaggaggatgctcatagagtaaaagttacatttggagatgagaaaacccggtttaggttgccaaagatctggtgttatgaagatcttgtgcaggaaattgctaggagatttaatgtaagtgaaatgagcaaatttgatatcaaatatttggacgatgattatgaatgggtattactaacttgtgatgcagatttagaggagtgcatcgatgtttctcaatcttctgagactagtaccatcaaactttgtctgcaaccctccagtaattttatcaggagttctttagaatttagatag

SEQ ID NO: 229 - DNA, 1086 bp, Medicago truncatula
atgaactatttgtacccggtgaaagaagagtatttggaaattgaagcaaccccgtcatcattgacatatgaaagaggaagtgatgagggatcaacggttgttattccacggccaatggaggggcttcatgaagtaggaccaccaccatttcttacaaagacatttgatgttgtggaggaccccacaacaagtcacatagtttcatggagcagaggtggtgctagctttgttgtttgggatccaaatgctttctccagagaccttcttcctagatacttcaaacacaacaatttctcaagttttgttagacaactcaacacctatggttttagaaaaattgatcctgataaatgggagtttgcaaatgaaggatttctaagaggacataaacatcttttagcaaacattaagagaaggagacaaacatcacaacctagtacttcccaacaacaatcatcacattcacaaggtcattgtgttgaagttggtcgttttggattagacgaagaaatcgatcatttgaggcgcgacaaacaagtgttaatgatggaacttgtgaagcttagacaacagcaacataatacaagatccattcttcaagcaatggaggaaaggctacgtggaactgaaattaagcagcaacaaatgatggcttttttggccagagctatgaaaaatccagcttttattcagcaattacttcaacagaaggaaaagagaaaggagattgaagatgctattactaagaagaggagaaggccaattgagtatggagaatcaagtaatggtggcgatggaaggagtagtgttcgatatggatttgaagtgtcagagttggaaatgttggctatggaaatgcagggtcttggaagaggtggtggagaacatgaggaagagattgaggtatttgagactaatgagaaattgaataaagaacttgatgaagggttttgggaagaactttttagtgagaaatttgagagtgaattagatattctaacttctcaagatgatgatgatgatgatgatgaagatatcaatgtgttgtccaatcgctttggttacttaggttctagttcgaaatga

SEQ ID NO: 230 - DNA, 1191 bp, Medicago truncatula
atgttggagcaagatttcctcaccaccacctcagccacagccactgtaaggtctgcgggaacgtgggcacgaacatgtgacacgtgccgctcggccccatgcgcggttttctgccgcgcagactcggcatatttatgtgccgcgtgtgatgcacgcatccacgcggcaaaccgtgtagcctcgaggcacgaacgcgtctgggtctgtgaggcctgcgagcgtgccccggcggcttttctttgtaaagctgatgctgcttctctttgctccacttgtgatgctgatatccactctgctaaccctcttgcaagccgccaccaacgtgtcccgattcttccaatttccggttacctatacggtcctccggccacccttttaggtgccgaagatgaaggcttcgtccgcggtggttgtgaggtggaggaagaggaggatgaaggtgttgatcatgatatggaagatgaaaatgaagcagcttcatggcttttgttgaatcctctaaagaacaacaataacaatagtaacaacaacattagcaatgatcataatcaagtggctaataatggatatttgtttagtggagaagttgatgagtatttggaccttgttgattgtaattcttgtggtggtgatgaaaacactttcactaccaataatactcatcatcatgatgagtatagtcaacaacaacaacaacaagatcattatggtgttcctcaaaaaagctatgttggtgatagtgttgttcctgttcaacaacagcaggtacagaattttcaacttgggttggaatttgagtcttccaaagctggattcagttacaatggtggttctattagtcaaagtgtttcagtttcatcaatggatgttggtgttgtaccagaatcaaccatgacctattcaagacctccaaaaggaacaattgacctattttcaggtccttctattcaaatgtcttcccatttctctccaatggatagagaagcaagagtcttaaggtacagagagaaaaagaagacaagaaaatttgagaaaacaattaggtatgcttcaaggaaagcctatgcagaaactcgaccgcgtataaaaggtcgattcgcgaagagaacagatgtagaagctgaagttgatcaaatgttttccacatcactaattacagaagttggatatggaattgttccctctttctga

SEQ ID NO: 231 - DNA, 693 bp, Medicago truncatula
atggtgagaggaaagacacaaatgaagcgtatagagaacgcaacaagtagacaagtaacattctcaaagagaagaaatggtttgttgaagaaggcctttgaactgtcagtgttatgtgatgctgaggttgctcttattgttttctcaccaagagggaggctttatgaatttacaagctctagcattctggaaacaattgaacgataccgcagtcataccaggattaataatactccaacaacatctgaatcagttgaaaatactcagcagttgaaggaagaagcagaaaacatgatgaaaaagattgaccttcttgagacttcaaaacggaaactcttaggagaaggtttagggtcttgttccattgatgaactacaaaagattgaacaacagttagagagaagtataagcaaaattcgagcaaaaaagactcaggttttcagggaacaaattgagcagctaaaggaaaaggaaaaaaccctagttgctgaaaatgccatgctcgcagagaagtatggtaactattcatcacaggaagcaacaaaggatcagagagaaaatatagttgaagctgaaacttatgcagatcaaagtagtccaagttcagatgtggaaactgaattgttcattggtcttccagaaacaagaacaaggcgcatttctccaaaggtagataatagtggtgaattgtaa

SEQ ID NO: 232 - DNA, 2049 bp, Medicago truncatula
atggggttaatcgatctcaacactacagaggatgatgaaacaccatattcagctatttcttcttcatcttcttcttctcactctggtataagcacttctgcttcagcagctatggttgttcctccacctcttcctcctcaaggttctgtttgtttggagctatggcatgcttgtgctggtcctttgatctctttaccaaagaaaggaagcattgttgtttatgttccacaaggacactttgaacaagctcatgattttcctgtttctgcttgtaatattccacctcatgttttctgtcgtgttcttgatgttaagcttcatgctgaggaagggagtgatgaagtgtattgccaagtcttgttggttcctgaaaatcagcaactggagcaaaatgttcgtgaaggggtaattgatgctgatgcagaagaggaggatactgaagctattgtgaagtcaacaacaccccatatgttctgcaagactctcacagcttctgacactagcactcatggaggattctcagtgcctcgtcgagctgctgaagactgctttcctcccctggattacggccagcagagaccttcacaagagcttgtagcgaaggatctgcatggctcagagtggaggttccgacatatatacagggggcagccaaggaggcatttgctcacaactgggtggagtgcatttgttaataagaagaagcttgtgtccggtgatgctgtgttgtttcttaggggcgaggatggagaactgagactagggattcgaagggcggtgcagttgaaaagttctggttcctttggaggtctctctggtatgcaactggatcctggctctctcatggatgttgtgaatgctttatccaaaagatctgcttttagtgtttgctataatccaagggtcagttcttcagaattcatcatacctgtcaacaagttcttgaagagccttgattgttcttattccgctggaatgaggttcaggatgcgttttgaaactgaagatgctgcagagcgaaggttcactggattaattgctggaataagtgatgcggatcctgttagatggccaggatcaaaatggaaatgcctattggtaaggtgggatgacatagaagcatcgaggcataataatagggtttccccatgggaaatcgagccatctggttctgcttccaattccagcaacctgatggcagctagtttgaagaggaccaggattggattcacttcagcaaagctagaatttccagttcccaatgggattggagcgtcagactttggggaatcattaagattccgaaaggtcttgcaaggtcaagaaattatgggcatgaatactccctatgacagtattaatgctcagagtccccggttatatgagctagggaggtgctatcctggttcaaactgttccgggattgctgcaacaggaaatatcagaatgcacccagcggcttctgattttccctctaatggcataggctttggtgaatctttcagattccaaaaggtcttgcaaggtcaagaaattcttctgtgcccaccctacggacgagcctcgtttgacgaggcccgtggaagtggttgcattggacgttatgatggttatccaatgctcggctccagaaatggatggcctgcacagatgcacgacgctgctacacatttgcatgcatctgttacatctggacaagtttcgtctccgtcgtctgtgttaatgttccagcaggctgttaatccagtttcaaactctcgttatgataatattaatctcaaccagggttcatacatatctgaagctaaaagtggaatgtttgcgccttccctatctgacaagcctattttatctagtggactagctctggaaggcacaacttcttttggtgtgcatgattttcataataataataatttgttggatggttcaaggtctcgtgattcagtgttagcgatgagagacaatcaagatatggtttcttgtaaaactggctgcagactctttgggttttcattaaccgatgacacacacattggcggcggttga

SEQ ID NO: 233 - DNA, 735 bp, Medicago truncatula
atggagaacattggtgatgagtacaagcattactgggagaccaacatgttcttccaaactcaagagcttgatagctggggattggatgaggctttatcagcatattatgattcaagctcaccagatggtgcagcatcatcaggagtttcatctaagaacattgtctctgagaggaataggagaaagaagcttaatgaaagactctttgcacttagagcagtggtcccaaacattagcaagatggataaagcttcaataattaaggatgctattgagtacatacagctgttgcatgagcaagaaaaggttattcaagctgagataatggaacttgaatcagggatgcctaataatattaatccaagctatgattttgatcaagagcttcctatgttgctaaggtccaagaagaagagaacagatcagttatatgattctgtcagttcaagaaactttccaattgaagtccttgagcttagggttacatacatgggagagaatacaatggtagtgagcttgacatgtaacaaaagggcagacacaatggtaaaattgtgtgaagttttcgaatctttgaagcttaaaattattactgccaacatcacctctttttcaggcaggcttttgaagacagtcttcattgaggcaaatgaggaagataaagatcaattgcaaacgaatatccaaacagccattgcagctcttaatgaccctctaagccctatgagcatctaa

SEQ ID NO: 234 - DNA, 585 bp, Medicago truncatula
atgagttgcaacggttgccgagttttgagaaagggatgcagtgaggattgcatgttacgagattgtctaacgtggatacaaaatccacaagcacaggctaacgccactgtctttgtcaccaagttctttggccgtgccaccctcatgtctttcctttcacctgttcatcccaaccaaagatcatgtttgttccagtcgcttatgtatgaagctgttgggagaactataaatccagtaaatggagcagttgggctgttatggactggaaagtggcaattctgtcaacttggtgttgaacaagtgctgagaggtaacggcggcgcgttgacggcactccctgatcagttgttaggtgtggatcatgatagtagttcaattcatcatcaatatcaccaacagcaatctgggttgatgtcatactctagagtggtgaaaaaccaagcagaaaagcaacgtgcggggacacatgagtcagaggaatcggagtcttccacgttgggaagtagaacaagaacagaagattgttcttatgtttatgctaattctcaaactcaaaggaaccaactccttacactattcttatga

SEQ ID NO: 235 - DNA, 1713 bp, Medicago truncatula
atggagcttcctcaaacacgttcttatggagctggaggagcagggaggaaatcgacgcatgattttctgtcgctatacagtaattcaactgccgaacaagatccaaggccatctgctcaagcaagtttcctcaagacccatgatttcttgcggccactagaggaggtagaagcaaaatccagtgccaaggaagaagccacagatgaaatctcatcggtggttgagaagcaaccccctttagcaacaccagcttcagttgagcacctcttacctggaggaattgggacttacagtatcagccacattaattcctgcgtgaataataatcaaagggttccaaagccagaagcatcatcacttttcactgtgcatcaagcaactagtgctgatagaaatgacgacaactccaattgcagttcacatacttcaagcggtttcacattgtgggaagagtctgagattagaaagggaaagacaggaaaggagaataatgttggggataaacccattataggagattctgctgctaagttaggacagtggacattgaaggagcgaacgtctcaatcgttttctaacaatcatcatggcagcttcaactctcgctcttcatctcagacaactggacagaagaaccagagttttatggaaatgatgaaatctgcgcaggattgtgcccaggatgaggagctcgaaaatgaaggaacgttttttctcaagagagaatcctcgaatgttcaaagaggagaactaagggtgagagtggacggcaagagtactgatcaaaagccgaatacaccgagatcaaaacattctgcaacagagcagcgaagaagaagcaaaattaatgacaggtttcagatgctacgagagcttattcctcacagtgatcaaaagagggacaaagcatcttttttgttagaggtcattgagtacattcactttttgcaagagaaggttcataagtatgaaggttcattccaaggttggaataacgaaccagaaaaactgatgccatggagaaataatgacaggccagcagaaagttttcaacctcgcagcgcaaatggtgggtctaatccatctccaacattgttgtttgcttcaaaggttgacgagaaaaacatcaccatctccccaacaactcatgggggtatccataatgtagaatctagcttgagcacaacaactgccttgaagacaatagatcatccatctggaataacaaacaaggcttttccaagtcctatttcttcccaaccaaatttcttaacttcaacccaaatcggaggttcaggtggagcagtgtctcagctcagacgtagattatcatctgatgcagagaacaccaattatcaaccttcagtagaatctcagactatgacttcaaccagtgaaaagctgaaagagaaagagctcaccattgaaggaggtgccattagcatatcaagtgtgtactcacaagggttgttggatacacttacacaagccttgcagagttcgggagtggatttatcacaggctagcatttcggtgcaaattgaacttggtaaacaagcaagcctcagaccaaacataccaatgccaatgtgtgtttccaaggatgatgaagatccttctaagaatcaaaggaaaatgcgctctggctctagagtcgctagctctgagaagtctgatcaagcactaaagaagctgaaaatgtgcagaagttaa

SEQ ID NO: 236 - DNA, 507 bp, Medicago truncatula
atggcttcttcatcatcttcttcttccaaaagacacccaacataccacggaattaggagccgaggaggaaaatgggtgactgaaatccgcgagcctcgtaagaccaaccgcatatggctaggcacattccctacccctgagatggcagccgcggcttatgatgtcgcgactttggccctcaaaggcggggatgctgttctaaacttccctaattcagctagcaagtacccggtgcctgcgtctaattcaccagatgatatccgcagtgctgccacagctgcagctgagttaacggcggctgaagccgttaataatgatgctggcttaaatggtaggccttggtatgaaactgagtttcttgatgaagaagctatattctcaatgccaagattgatggtagaaatggctgagggtatgttgctttctcctcccagaatgaatccaccaccgtctgagtacttgcctgaatactacacttcgggagaaagtttgtggagctactattga

SEQ ID NO: 237 - DNA, 264 bp, Sorghum bicolor
atgtctgggtccaggaactcttcccgcaacgttaacattgattccaactggagcaaaaaggagaacaagctgttcgaggaggccctagcctgctatggtgagggcacacctgaccgctggcacaaggtggcccgtgccatgggtggcatcaagacagccgatgaagttcgccgccattatgagatccttaatgatgatgtcacgctcattgaatccggcggagttccattccccaactacaacacacagggagcttggaactaa

SEQ ID NO: 238 - DNA, 264 bp, Sorghum bicolor
atgtctgcctcgcggagctcctctcccaactccatgtcaaagtggagccccaaagagaacaagatgtttgaacaggcactcgcctactatggcgagggcacacccaaccggtgggacaaggtgtccagcgccatgggaggcatcaagtctgctgaggaggtgcgctgccactatgaagatcttgactatgacgtcaagatgattgagtcaggccatgtaccgtacccccagtacaagacacagggattctggacccgaggttaa

SEQ ID NO: 239 - DNA, 294 bp, Sorghum bicolor
atgagttcatcctggaccgatagtcaaaacaagcttttcgagagggcgctggcagtatatgacaaggacacaccagaccgctggcacaatattgcacgagcagttggctgtggaaagacagctgaggatgtgaagaggcactacagatggctgaagagggatgtgcagcaaattgaatctggagaaggcggtcaaggatcccactccagcaactccagtggtagtggaagcagcagcaattcttgtggcaggaacaatgatgacaagaggatgaggcaccccaaaccgcagtga

SEQ ID NO: 240 - DNA, 1212 bp, Sorghum bicolor
atggagcctgtcttctcaatggaggagatcctcggacccttttgggacctgccatcaccaccaccaccagagcagcagcctctggtgatcggcaccagcagtgtcgtcatagatggtgttgttactcatggtggtaatggggagggtagcaacatgatggatcagattcagaacaccacggagtggacctttgagaggttactggaagaggagcttctaactgacacaacaccagtggcaaactctagttgcccagccctaaatgttgacccggtggtagaggtggaccagggagcgatggcgcctgaggcggtgagtgccgtaggtgatcccatggagtacaatgccatactgaagaggaagctggaggaggacctgatggccttcaaaatgtggagggcctctactagtggtgtgaactctgaaggctcaaacaatgaaaatggaggaggtactatctactataccaagctcaacggtgaagatctaatcaataatcatgctcaaaatgcagatcttcatgtgaggcttactactagctcttcctcaagggatccttcaccatcagatgaggatatggatggtgaagtagagattctgggatttaagatgcctactgaggaaagagtgaggaaaagaaaggaatctaatagagaatcagccagacgctcaagatatagaaaagccgctcacttgaaggatctggaggaccaggtagacaaactaaaagctgagaattcttgtctattgaggcggcttgctgctttgaaccagaagtacaatgatgctactgttgacaacagggtactgaaagcagacatggagaccctaagagctaaggtgaagatgggagaggactccctaaagcggatcatagagatgacctcactgacctccatacccattccagagcttcccagcagctctgatgttccagtgcatatccaagacaacatcgtcaactatttcactaccaccccagcaggcgatgctttggctgacaacagcttcatgcccatgccagacccattgccattgcaactgcaagctgaagagccaaccatcaatggagctctgaatgccacagagatgaaccaaatcgctacgcactgcgcggcagggagccaaccatcaatgcagcttatccaggagacaatgggagccatgatgccgacctcctccggatcaactctccaggaatctgagctgttg

SEQ ID NO: 241 - DNA, 1029 bp, Sorghum bicolor
atggggctggacgtcggtgagatcgggatgggcctggatctgggtctcgacctcaggctgttcgccgcgcggacagccggcgggatggcggcggccgcggccaagggtgcgccggcggggatcgagtcctgtatcaggagcctcgaggaggagcgcaagaagatcgaggtgttcaggcgcgagctcccgctctgcgcgcgcctcctcgccgacgtgatcgacgagttgaaggaggaggccgccaagagaggcggaggagacgcggacgcgaaggcggacgacggcgacaagcggaaatggatgagcaccgctcagttgtgggtggacagcgaagccaaatcggacgagtctgataaggagcatcagagtgaaatcacctcgccggagcccaagttgctcggtggcgcacccatgcccataagggccgttgcggctgtaccacccctgccgccgccgttcttcaggagagaagacagctctgccggcacttgtctgtcgttggtatcgccggcatctaaggccccgatttctcccgtggctaccagcgataacgccagcggcagattttgtcccaccatgccaccatctggctcttctggggtcaccttgcactctcaggctcagcagcaggctagcaggaaggcgaggcggtgctggtcgccggagcttcaccggcagttcgtcgccgctttgcatcaactcggcggccctcaagttgctactccgaaacaaatcagggaggtgatgcaagtggacggtcttacaaatgatgaagtgaaaagccatctccagaagtaccggctgcacaacagaagatcccccggtgttgctccggtgagccagccgatcatgttggtgggtggcctctgggctccacaggagcaaagcagctccggttcaccccagggtccgcttcagttctcgggatcaggtgtggccatttctacggccaccgtcggcggtgacagcagcggcagcagcagcgacgaagacgacaagtccgaaggctacagccggaaatgcgtgtaa

SEQ ID NO: 242 - DNA, 1011 bp, Sorghum bicolor
atggacaccgcggtggagctggagctggagcagaagccggcggtgggttactggagcgtggtgggcgcccggccctgcgacgcgtgcgccgcggagccggcgcggctgcactgccgcgaggacggcgcgttcctgtgccccggctgcgacgcccgggcgcacggcgccgggtcccgccacgcgcgcgtctggctgtgcgaggtctgcgagcacgcccccgccgccgtcacctgccgcgccgacgccgccgcgctctgcgccgcctgcgacgccgacatccactcggccaacccgctcgcgcgccgccacgagcgcctccccgtcgcgcccttcttcggcgcgctcgctgacgcgccccagcccttcccgtccccggccttcgccgccgctgccgcagcggggggccaggctcagggggaagccgcggcggcggacaacgacgacgacgacgggagcaacgaggccgaggcggcgtcgtggctgctcgccgagcccgacaacagccacgaggacagcgccgccgccaccgccgccgacacgttgttcgcggaatcggacgcgtacctcggcgtcgacctggacttcgcccggtgcatggacggcgtcaaggccatcggcgtgccggtcgcgccgcccgagctggacatcgctgccggcagctttttctaccccgaacactccatgaaccacagtttgtcgtcgtcggaggtggcggtggtgccggacgcgcaggcggccggcgtgccggcggtggtgagcagggggaaggagcgggaggcgcggctgatgcggtaccgtgagaagcgcaagaaccgccggttcgacaagaccatccgctacgcgtcccgcaaggcgtacgccgagacgcggccgcgcatcaagggccgcttcgccaagcgctgctccgcggaggccgacgacgacgcgctggagcacgacgaaggcgcgtgcttctcgcccgcggggtcggcgcacgcggcgtcggacggcgtcgtcccgtccttctgttga

SEQ ID NO: 243 - DNA, 954 bp, Sorghum bicolor
atggcgggtggcggcgccgacgacgacgacgtggtggaggtgagctgcggcggcagaggcggcggcgaccccggcgcgtacgccgcggtgctcaagaggaagctcgacctgtactgcgccgccgtcgccaaatccatggaagctaaatcacaagaatcttcgttgggctaccccaactcacaagcttcagatacttcgcaattgatttctcaagcttcctttgatggtgacatagatggagcaggccttgtcacaaactctaatgtcataatagaagatgatgattttcaaggcaagccaaccaatagtggtacatcaaaggaactgtcagacgatgatggtgaccttgaagagaacactgaccccactaacgccaagaagatgaggagaatgctgtcaaatcgggaatcagctaggcgatcaagaaagaggaagcaagcacacttgaacgatcttgaatcacaggtttccaggttaacatctgagaatgcatctttgctaaagcgtctggctgatatgactcagaaatacaaggatgcttcccttgacaataaaaatctaacagttgatattgagactatgaggagaaaggtgaacatagccgaggaagctgtcaggagactaactggaacaaccctcatgttatcaaccgcatttgacaagcccatgagcagcacacccttgtcatcatgtgcatctgatgcggcttctgcctctgtcgccattgaagatagcgcgaaacatttcctccatgcgccacttcaaagcggtcagatgaagcttgacatcctgaacgcggcgattcctctgaccagtgaggggataggcaccaagccagcttctctgcagcgtgttgctagcttggagaacctgcagaagaggatcattggagattcgatgcactctgagactgcatcaacattctcagagcctgaagctcttgccgataggtaa

SEQ ID NO: 244 - DNA, 750 bp, Sorghum bicolor
atggagtacggcgtcgccgacgactacgggtacgggtacggcgggtacgacgaccagcaggatctgccgtcgtcgtcgtccgtggacggtgacgagtacgcgacggtgctgtcggcgccgccgaagcgccccgcgggtcggaccaagttccgggagacgcgtcacccggtgtaccgcggcgtgcggcggcgcgggcccgcggggcggtgggtgtgcgaggtccgggagcccaacaagaagtcccgcatctggctcggcaccttcgccaccgccgaggccgccgcgcgcgcgcacgacgtcgccgcgctcgcgctccgcggccgagccgcctgcctcaacttcgccgactccgcgcgcctgctccgcgtcgaccccgccacgctcgccacccccgacgacatccgacgcgccgccatccagctcgccgaggactcctcttcctccacgccggacgcctccgccgccgccgctgccgtggccgtggcgtcatctgcctccgtcggccaggccacgccctcgtcgtccgcgtaccaggccggggacgacgccacgggggctgcaatgtatggcgccgagtacgcggcggcggcaatgtatggcgctggcatggacttcgaccactcgtattactacgacgggatggtgggcgggaacgagtggcagagcgccggcagcagcgggtggcatagcaacgtggacgccggcgacgacgaaggcgccggcgacatgtcgctctggagctattactga

SEQ ID NO: 245 - DNA, 813 bp, Sorghum bicolor
atggacaggccagaccaccaccagcaccagttcttcatgccggcgccggcgccggcgacggtgcaggtgccgcagccacagcagcagcagcagcagcagatttgcgtgccgatgatggacgagccgtcgtcgttcttggcggggatgggcggcggaggtggcgggccgtcgtcgtcgtcggcgaggggtgagaggaagcggcggttcacggaggagcagatacggtcgctggagtccatgttccacgcgcaccacgccaagctggagccccgggagaaggcggagctggcgcgggagctgggcctgcagccccggcaggtggccatctggttccagaacaagcgcgcccgctggcgctccaagcagctggagcacgactacgccgtgctccgcgccaagttcgacgacctccacgcccgcgtcgagtccctcaagcaggacaagctcgccctcaccacacagttgaacgagctaagcgagaggctgagggagcgagaggaccgggccgccggcggcgcgacgacggctagcagcagcagctgcaacgtcggcggtgctgaggccgaggccgaggccgaggacgacaagaggaacgtcgtgctcgggtgcgtcaacaacatggagccgcccgagcccgagagctgtgtgctcgtcgggccgtgcgcgacgccggcggacgtctcggtggagtccgagtgcgacgaccaccaccaccaccaccttgactacgacgacgggttcccggagtcctactgcgccatgccggagctgtgggagccctggccgcttgtggagtggaatgcggtggcctga

SEQ ID NO: 246 - DNA, 804 bp, Sorghum bicolor
atggacagtcgatccatggcgaccagccgcgccggcgtggacgcggccggcggtgtggcgccgttcgtggccaagacgtaccgcatggtggacgacccggccaccgacgccgtcgtcgcgtggggcagggacagcaacagcttcgtcgtcgccgaccctttcgtcttctcgcagacgctcctgcccgcgcacttcaagcactccaacttctccagcttcgtccgccagctcaacacctacggcttccggaaggtggatccggaccggtgggagttcgcgcacgtgtcgttcctgcgcgggcagacgcacctcctgagccagatcgtccgccggagcagcggcggcggcaacggcggcaagcgcaataaggacgacggcggcggcggcggcggcgtggacgaggacgacgcggcggtggccatggaggtggtccggctgaggcgggagcagcgagcgatcgaggagcaggtggccgcgatgtggcgccgcgtgcaggagacggagcggcggcccaagcagatgctcgcgttcctcgtcaaggtcgcgggcgacccgcaggtgctgcgccgcctcgtctccggcgccaccgccgccgggaccgacgacgccgccgccgccacggagccgcaggacgccgccaacgtcaagagggcgcggctgcttctggacgccggcggcggcggtagcgacggcgccgtcgacttcagcgggttctgtagcaccggagacgaagcagacgttgggttcaccgattacctgctgcagccaccgccgtacgtgttccccgtcaacagcggctactga

SEQ ID NO: 247 - DNA, 507 bp, Sorghum bicolor
atgcaggagcagccggcgagctcgcggccttccagcagcgagaggtcgtctagctccgcgcaccacatggacatggaggtcaaggaagggatggagagcgacgaggagataaggagagtgccggagctgggcctggagctgccgggagcttccacgtcgggcagggaggttggcccgggcgccgccggcgcagaccgcgccctggcccagtcgtccacggcgcaggccagcgcgcgccgccgcgtccgcagccccgccgacaaggagcacaagcgcctcaaaagattactgaggaaccgggtgtcagctcaacaggcaagagagaggaagaaggcttatttgactgatctggaggtgaaggtgaaggacctggagaagaagaactcggagatggaagagaggctctccaccctccagaacgagaaccagatgctccgacagatactgaagaacaccactgtaagcagaagaggttcaggaagcactgctagtggagagggccaatag

SEQ ID NO: 248 - DNA, 1494 bp, Sorghum bicolor
atggagtcagtaaaccatttgcaagcgatgaactctcagagtcttcttgcgatggagcaaatcgctgcttccgacaaaacagcacatgtctctgcactttcagttcataagctgttcgatgctaaattggatcaccacagcttgatggatggcacctcggcatccacgagtcagtcatcaaacatcaagaccgagttgatccgatcatcaagcttgtcaaggagcctatcagttaaccttcagaaaagaagccctgaatctgatcctgaaagcccacagtctcacgtctcacatcctaaattttcagaacccatgttctcaaattcttcgacattctgcacaagcttgttttcgtcatcttcgacaaaaacagaaccatgccatcaaatgggcactttgcctttcctgcctcacccccctaagtgtgagcaacaagtttcagctgggcagtcatcaagctcctctctgctgttaagtggtgatactggcaatggtttagatgaagctgaacagtcagatgatctgaaagacttcctcgatctttctggagatgcttctgatggcagcttccaagaaaacaatgccttggcttatgatgaacagatggaatttcagttcctgtctgagcagctaggaattgccatcactgacaatgaaaagagtcctcatttagatgacatatatggcacaccaccacagctgtcatcacttccaatatcatcttgctccactcagagtatacaggatctaggatcaccagttaaagtccagcttagctcatctcagtcatcttctagctctgcaacaactaacaagtcaaggttgaggtggacacttgagcttcatgagcgttttctggaggctgtaaaaaagcttgaaggacctgaaaaagcaactcctaagggtgtgctgaaactaatgaaggtagaaggtctaaccatttatcatgtgaagagccatctgcagaagtatcggcttgcgaaatatcttcctgggcctaaagaagataagaaggcttcttcggaggataaaaaggcacaaacaggaaagagcggcagtgattcaagcaaaaacaagaatttacaagtggcagaagctctaaggatgcaaatcgaggttcagaaacagcttcatgaacaattagaggtgcaaaggcagttgcagctacggatagaggaacatgcaagatacttgcagaaaatactggaagagcagaaggccggcagtttgtcactaaaagctccaaccaaggcacaagcgacagagtcacctgaatcgacattagatgaggtaagcaccactccgcagccatccaggaacagaaatccagttgtagacacagaatgcaagtcgcctgtagacacagaatgcaagtcgccggcaaggccatccaagaacagaatcccagttgtagacacagaatgcaaatcgccggcaaggatcaagagaacaaaagttcaggttgatctcgagaacgagaccctgtgttcatag

SEQ ID NO: 249 - DNA, 1008 bp, Sorghum bicolor
atgtgcggaggcgccatcctcgcggaactgatcccgccgacgcggcgcgtggcgccgaagccggtgaccgagggccacctctggccggcgagctccaagaaagccggcagcggcagcaacaagaggcaccaccacgaatacgccgacgacgacgattttgaggccgccttcgaggagttcgacgacgactttgacgtgcacgaagacgacgaggaccaccctgaccacttcgtgttctcgtccaaatccgctttctccccagcgcacgacggcaggcgcgatgcgcgagccgcggcgagccagaggacgaagcgcggccgccgccacttccacggcatccggcagcgtccctggggcaagtgggcggcggagatccgcgacccgcacaagggcacccgcgtctggctcggcaccttcaacaccgccgaggacgccgcccgggcctacgacgtcgaggcgcgccgcctccgcggcagcaaggccaaggtcaacttccccgcagccagcgcgcgcccacgcgcacgccgcggcaagggcaacccaagaaccgcgccgaaacctgcagcacaggcacagcccgctctgctccttcgaggggagaagggtctggaaggagttgccgtgaagcctgaaactactatggacatgttcgacgtgggcagcttcttcgacatgaccttccccaccttcccagccgcgccggcggcggccatggagagctccttcgctggcagcagcgccacgtcggagacccggagccccgggaagaagctgagatacgacgacggcgactcgtccgaggggagcggctgtggctccgcgctggagctcgctgacgagctggcgttcgatccgtttatgctactgcagatgccctactctggcgggtacgattccctggacggccttttcgccgcagaggccgtgcagcaggacgtgaacaacgacatgaacggcgtcagcctgtggagcttcgacgagttccccgtcgacggctatgttttctga

SEQ ID NO: 250 - DNA, 279 bp, Sorghum bicolor
atggcaacgatgtcgctgagctcgacgagggcgcagtggacggcgaagcagaacaagctgttcgagcaggcgctggcggtgtacgacagggacacgccggaccggtggcacaacatcgcgcgcgccgtcgggggcggcaagtcggcggacgaggtcaggcgctactacgagctgctggtgaaggacgtggagcacatcgaggccggcaaggtgcccttcccggcctacaggtgccccgccggctacgacgccgacaggctgaagcacctgaagatctag

SEQ ID NO: 251 - DNA, 1560 bp, Sorghum bicolor
atggaaggcaggatgacaagtttggaagccgccatgaaagcttcttcgtcaatggcaagcagcatggcaaggaatgctgaccctgaccatcagactctccgctccaattcagtggagcagttttattttccaagacctggccaatctttgccaggcattcctccattctttgggcctccctcctccagtttgtatcctcctaatgacaatgaagctaaatttggcagccagtttgaatcaaatccttcacagaatacagattgggacccgcaggctatagtgagcaacctaaccttccttgagcagaagatcaaacaggtaaaagatattgtgcagtccatgaataatcgagagaaccaagtagctggtggttccagtgagctagcggcaaagcagcagctcataaccgctgatctcactagcattataatccagctcatatctactgctggttccctgctcccttcaatgaagaacccacttcttagcagcaatccggcagtcaggcagctcggcaacactcttggttctcctatgggctttggcatgaatgctaatcagcgaccaagtgtagacagcaagactgatattcctgacacaggaaaaacttctgattatgatgaactgatgaatagccttaatactgctcaagatgaaagagatgagctgatcaaatgcccaaatctctgtggtggtgaagggtctgaaccgactccgatggaggaccatgatgtgaaggagagtgatgatggtggtgagggagagaatcttcctcctggttcatatgtagtcttgcaattggaaaaggaggagattttagcaccacatactcatttctgcttgatctgtggtaagggtttcaaaagagatgctaacctaaggatgcacatgaggggccatggagatgagtacaagactccagctgctcttgccaagcccacaaaggattctggtgcagatcatgcaccggttacaaggtactcatgcccatttgtgggttgcaaacggaacaaagagcacaagaagttccagcctctcaaaacaatattgtgtgtgaagaaccattacaagagaagccattgtgacaagagctacacctgcagccgttgcaacaccaagaagttctctgtcattgccgacttgaagactcatgagaagcactgtggtcgtgataagtggctctgttcttgtggaacaaccttctccaggaaggacaagctttttgggcatgttgcccttttccaaggccacacacctgcgctccccatggaagatgtgaaggtatcagaagcatcagagctacctcaggacagtgagccaacgaatgaaatggcgaggagcatggtgtatagcttccccagtagctcgtctgatggtatatcgaacctcgacatgaaaatggctgatgatgtgcgtggttatttctcgccactgaactttgatccttgctttggtgcgcttgacgacttcactcgccctgggtttgacatctctgagaaccccttctccttcctgccttcaggatcttgcagttatgggcagcaaaacggagatagctaa

SEQ ID NO: 252 - DNA, 2574 bp, Sorghum bicolor
atggaagagggaggagacccgcagccgcagcttccgagcatctccgtggcacgcaccacgtccgaaggcgcgggggccgccgtcgacttggatctccttgagcagctactgtccggcgacaacggctggctcgaggtggtctcgcgctcgcccaattcggtagcgttttctccaccctcggccttcttctcggctgacgcgacagccaccacagtgacgacgaccacggcggcgccgaccgcgaacgccagctggtggattcagacgggcggcgcaagcccctcctccgtgcgggagcggttcagccaggccctgtcctacatccgggacacgcagagcgacggcgacgtcctcgtgcagctctgggtgccggtcaaccgcgacgacgggaagctggtgctcaccaccagcggtcagccgttcacgctcgaccaccgctccgacagcctcatccggttcagggatgtgtccaccaagtaccagttctcggccgacgtcaattcaggggacacgccagggctgccagggagggtcttcatcggcaggctccccgagtggtcgccggacatcaggtacttcaccagctacgagtatcccagggtaagggatgcacagtacctcgatgtccacggcaccatggggctgccagtgttcgagaaaggaagctacaattgcctgggcgtcatcgagctgatcatgacaaggcagaagctcaacttcacctctgagctcaacaccatctgcagtgctctccaggcagttaatctcagaagtacagaagtttcgagcattccacgcataaagttcagcactgcttcctacaaagatgctttgccagagatactggaggtcctgagagcagcctgcctgacccacaagctgccattagctcagacatgggtcacatgcgctcaacaagggaaaagaggcagccgacattctgacgagaactacaggtactgcatttccaccattgacgaagcatgctttgtgaatgaagccgagatgcggggcttccatgaggcctgctcagagcaccacctgctgcgtggggagggggtggcagggaaggccttcacaacaaaccagccatgcttcttgccggacattggatcctcaaccaaattggaataccccttgtctcaccatgctaagatcttcaagttaaaaggtgcagtggcaatccgactgcggtgcacacgcactgggacagcagacttcgtgctggaattctttctgccaacagattgtgaagcactggaggagcagaagacagtgctggactccttgtcaagcaccatgcgtggtgtttgccagaccctacgtgtggtcacagatagagagatggaagacgaagcggtgctggaaatgaacgagttgaactcatttactcctcaggggaaggacaaagttgaggagttgtcctttggaggcaaatcagcagatcgtagaggagaggcctcttggacaagtctggcaggaacttcacagcaagaatccgagctagctgcattgcggatgcatggaatgttctcacctggggggcagggtccatctctatctggtgttcaggcaactgctgaaggcagcaaggcaaaaaggcgtacaaaggccgagaagaccgttagtttgcaggttcttcgacagtacttcgctggtagcctgaaagatgcagcaaggagccttggagtgtgccctacgaccctcaaaagaatatgcaggcagcatggtataacccgctggccatcgcgaaagatcaagaaggtagaccactctctaagaaagcttcaacagatcattgattcggttcatggagcagagacagctttccagctaaacaccctgtacaaggatctcacaaacacctcaatatcgtctgacaacaatttgtcaggaagtgtcatggttcctccaactaaccagagcaatctcactgacttcaacaagcaccaaccccacaagtcaagtagcaatgtgccatcaacttcacactcacactcttcttgcagccacagttctaagtcaagcccctcatgtagcggtggtgcaacaaaacatgcacaacagggtataattgatctgattaagtcaaaaaatcctgtgaaagacagctctattcagactctgcaaacagaaaacccttcattatatgagcatttctcagttcatgaggctccaattgatcttctacaggatgttactgaaaaggctaatggtggacatcattcttctccaagcccgtcatcccacaatcctaagcagaacacagacgcaaatatgagagtaaaggcaacatttggctcagaaaaggtgagattcagactgaatccagagtgcaattttcaagaactgaagcatgagatagcaaaacgtttgagtatagtagacacaaaccccttggttttaaagtacttggatgatgattcagaatgggtcttgatgacatgtgatgcagatctacaggagtgccttcatgtatacaaactagcagatatccaaacaatcaaaatttcagttcatttagctattagtccagctacaagggtcacaactggtcacactggtttgtcatga

SEQ ID NO: 253 - DNA, 1089 bp, Sorghum bicolor
atggacccttcggtggcgccgggcattgtcaaggaggagctcctggagcagcagcagccgctgcaggacggtgtgggtgacggcgggggtgcgccgcgcccgatggaggggctgcacgaggtgggtcccccgccgttcctcaccaagacgttcgacctggtggaggacccggccaccgacgccgtcgtctcctggagccgtgccggcaacagcttcgtcgtctgggacccgcacgtcttcgccgacacgatgctcccacgcctcttcaagcacagcaacttctccagcttcgtgcgccagctcaacacctatggcttcagaaaggttgatcctgacaggtgggagtttgcaaatgaaggttttctcaggggtcaaaggcacctgcttaagatgataaagagaaggaagccaccatcagctgtgccaccattgcgacagcagcaggcccctgcttcttgcctggaggttggtgagtttggatttgaggaagagattgataggctgaagcgtgacaagaacattttgatcacagaagtagtaaagctaaggcaggagcagcaaactactaaagatcatgtgagggccatggaggaaaggctacgagtggctgaacagaagcaggttcagatgatggggttcttggcaagagcaatgcggaatccagagtttttccagcagttggtccagcagcaagacaagagaaaggagctcgaggatgctatttcaaagaaaagaaggcggcccattgacaacactccgttctacagtactggggaaacaagtcagggcgagcagcttgattcacagtttatgttcgagtcagatgtgctcaatgggctcagtgaacctggaatgcctgagctggagaatttagcagtgaacattcaggagcttgggaagggaagcatagatggcgagaaggtggctcaagctagtgaccagtcagagctgaatgatgacttctgggcagagctgttggtcgaagatttcggagacaaggcaggacagtcagagttggagggaagaactgaagacgtggatgaccttgctcaacaactggggtatctgagtaattctagcccaaagtag

SEQ ID NO: 254 - DNA, 1236 bp, Sorghum bicolor
atgaattataacttcagctccaacgctctcgacgaggaggaggtcgctggaagaggcggggaaggagggagctgcgccgcagcaccagcatgggccaggccctgcgacgggtgccgggcggcgcccagcgtggtgtactgccacgccgacgcggcgtacctgtgcgcgtcgtgcgacgtgcgggtgcacgccgccaaccgcgttgcgtcgcgccacgagcgcgtgcgcgtgtgcgaggcctgcgagcgcgcgccagcagtgctggcgtgccgcgccgacgccgccgcgctctgcgtcgtctgcgacgcgcaggtccactccgcgaacccgctggccgggaggcaccagcgcgtgcccgtgctgccgctccccgtcgcggccatcccggctgcttccgtgctcgccgaggctgcggccaccgccgtggccgtgggtgacaagcaggaagaggaggtggactcgtggctgctgctcaccaacaccaaggatccagtttcagacaacaacaactgcaactgcagcagcagcagcaacaacaacatcagcagcagcaacaccagcaccttctacgcggatgttgatgagtactttgatctcgtgggctacaattcctactgtgacaaccacatcaacagcaacccaaagcagtacgggatgcaagaacgacagcaacagcagcagctgctgctgcaaaaggaatttggagacaaggagggaagcgagcacgttgtgcctgcttcacaggtcgcgatggcaaatgagcagcagcagagtggttatggagttattggggtagagcaggctgcctccatgactgccgcggtcagtgcttacacagattccatcactaacagcatatctttctcatcatcaatggaggtgggtatagtcccagacaacatggcaacgacgacagacatgccaaactccggcatcctgctgacacctgctgaggccatcagcctcttctcgtcaggttcttcgcttcagatgccactccacttgacctccatggacagagaggccagggtcctcaggtacaaggagaagaagaagagcagaaagttcgcgaagaccatacgatatgcgacgaggaagacatatgcagaagcaaggccgaggatcaagggccgcttcgccaagagatcttctgatatggaaatcgaagtggaccagatgttctcatctgcagctctgtcgtctgatggtagctacggtacggttctatggttctga

SEQ ID NO: 255 - DNA, 681 bp, Sorghum bicolor
atggtgcgggggaagacggagctgaagcggatagagaacgcgacgagccggcaggtgaccttctccaagcgccgcaacgggctgctcaagaaggcctacgagctctccgtgctctgcgacgctgaggtcgggctcatcgtcttctccccgcgcggcaagctctacgagttcgccagcgccgccagcctccagaaaacaattgaccgttataggacgtacacaagggaaaatgtcaataacaagactgttcaacaagatatacagcaagtcaaagcagatgctgtaagcttggcaaatagactcgaagcccttgaaaagaccaaacgaaagttcttgggtgaaaatttagaagaatgctccattgaagaactgcacaatttggaggttaaactggcgaagagtcttcacgtcatcagaggaaagaagacacaactgctggagcagcagataaccaagctgaaggagaaggagaggaacctgctcaaagacaacaaagaattgcgcgataagcagcgcaacctccagcctccaccggaggcgccaccagtcctgaaccgctgtctccctccttggccgcgtaacctgccggcgccaccgagcaacgacgacatggacgtggagacggagctgtacataggattacccggcagggagcgctcctccaacagggactctggttga

SEQ ID NO: 256 - DNA, 1728 bp, Sorghum bicolor
atgtttggccgaaacatccatgatggtgaaactgaagagaaggatggtgagaaagaggatggtgatggagaaaagctcacatcgcacatgttctgcaagacactcacagcttctgatacaagcactcatgggggattctctgttcctcggcgggctgcagaggactgctttccaccattggactatgagcagcttaggccttcccaagagcttattgccaaggatttgcatggcatgaaatggaggttccgtcatatctatagaggtcaacctcgtaggcatcttctgacaactggatggagttcatttattaataagaagaaactagtctcaggggatgcagtcttgtttctgagaggtagtgatggcgagctaagattgggtgtgaggagagcagttcaactgaaaaatgaagctctacttgaagctgtcaactgtactgattcgaagctacttatgctgtctgctgtggccagttctttggacaatagaagtatatttcacatctgtttcaacccaaggattggtgcatcagaatttattgtgccatattgcaagtttttgaagggcttgaactatcctttttcaattggaaccagatttaaagttggctgcaagaatgaagatgctaacgagaggtcctttggattgatctcaggtattagtgaagttgatcccatacgctggcctggatcaaaatggaaatctctcttggtaaagtgggatggtgataccaagtacagccaccagaatagagtatctccatgggacatcgagagagttggcagctcagtttcagttactcactgtctttcatcttgtgtttcgaagcgaatgaagttgtgcttcccccaaggcaatttggacgctccaattctagatggaaatggtcgtccagactctgtgggaactgaaggtttccaccaggtcttgcaaggtcaagaattggtgagggttcatggtgctgcatgctctcattcatcagatacccccagatgtcaaggctcttatggaaggagattctctgccgatgtgtggaactgcaagatgaatgatggacacctaaataccactgggtttgcttaccagcccctaggcttcagtgaatctgtcaaattctcagaggtcttgcaaggtcaagaaatgtctcaggtggcagccccttccttcatgagagatgctttcagtgctggcacacagaatggcagggttcgatcatttgattatgtgcagagatcagctgcaactcaaggatatgctctccagcaatttaatctgccagcaacagaagtgcattcaccgtcttctgttcttatgtttaaccaaaccatggtaccacagcctgagttagatggtctgaccaaccgtgaagaagcatatggcagcgggtactcatccattgcaatacagagagaagctgaaccatggccatccacgcagcagcaaagagtgcgcgaaaatggaagcgagcctctcgacacaactgaagcctcagctcctgcaaggatcgcaaaatctggatcggtggacaggggcgtcgggggaagcagctgtaagctttttggtttctccttgactgagaagatccttggaacagagggagttggtgggaaagaagggaactacgaagcggatcggcagactccccgggttctagacttgcttgggcacggccattctacgcccggtgctctgcatgctctttgcgctgctcccttgggaatatga

SEQ ID NO: 257 - DNA, 849 bp, Sorghum bicolor
atggacctgacgatgggtgatagctttgcgtgcttctgggattgcctcgacgactccgaggggatgcagagcttgtacatcgggccggacggcgacaccgcggtgtccggcggcggcgtccagctccaggtccacgacggctactccagcgccccggacgccgccggctccaacttctccgcgggggcggagagggagggcagcaggccatgcaacatggtcaccgtcatggagaggcgccgacgtcggaggctcaacgacaggctctacgccctccgcagcgtcgtcccaaacatcaccaagatggacaaggcgtccatcatcaaggacgccatcgagtacgtcctgcagctgcagcagctggagcgccagctgctcgccgaggtagccctcctcgacaccgccgcgaacgcgcaccatctgccagccggctgcgcgaacacgccatccacggaagacggcttcgcggggcacgccgccgtgtcggtgtcgccgaccaagaagatgaaacggaacccgtccttctcgtcccaccacagccgctcctcctcgccgccggtcgacgctctcgaggtgagggtgtcgggcgcgggggataaggtgctggtggtgagcgtcgcctgcacccaccggagggacgccgtcgccaaggtctgccgtgcgctcgacggccttcgcctccgcgtcatcgccgccaacgtcaccgccgcgtcggggaccgtgatgcacacggcactcgtccagaaagaggaaatgcatcagacagagatgaaggaaatgattgagacagcaatatcccaacttgatgatatcgtcggaagtccactgatgagtagtacgagttactga

SEQ ID NO: 258 - DNA, 744 bp, Sorghum bicolor
atgagctgcaacgggtgccgcgtcctgcgcaaggggtgcagcgacgcctgcgtgctccggcccagcatcgagtggatccacggcgcgcagccgcaggccaacgccaccgtcttcgtcgccaagttcttcggccgcgcgggcctcgtcgcctccctcgccgccgtcccgctgcaccaccgcccagctctgttccgttcgctgctgtacgaagcgtgcgggcggaccatcaacccggtgagcggcgccatcggcctgatgtggacgggcaactgggacctctgccaggccgccgccgacgccgtcctccgcggggactccctccgcgcgctctccaccgtccccgccgccttcacggagcgcgacatggacgggctctacggcgacgtcgtcgtcggcctcgccaccggtaccgcctcctcctcctcgcccgacgagaacaactcctcctccgcgccgccgtccagaaagcgcaggaacgtcgtcgtcaacggcgccggcgtcgtcgtccgtcccacgggctgccaccagcagcagcagccggccgggctgctgcagtcgtgcgagctcgacctctgcctgacgccggcgttgtcgccgccgccgctggcaggtgggctgctgctgggcggcggcgcgtcggacgagtactccgccacgacgacgtgcgaggaccaccagcccgtcaccggcggtgatcatgcggaggcccggaccacccccgcgctgctaaacctcttcaactaa

SEQ ID NO: 259 - DNA, 1488 bp, Sorghum bicolor
atggggcttcaaggggataaggcgacgcacgacttcctctcgctctacaccgccgccaaggacgccgccctgccgctgctccacgagtccaagctgccgccgccgccgacgacgacgacgtctcatcaaggtttgttcctcaagacgcacgacttgctgcagccgctggagaggccaccaccaccgcaagcccccgctgagaagccgctccaccagcacttgctgcccggcggcatcggcacgttcagcatcagcccaggcccgcgcgggcgcggcgcggcggccgtcgtgaagcaggagcagcagacgcccttcgcgctctgggggcagccggaccctcgaggtcacccgtggtcgctccccttcgccgcgcgctgcgtcgccgtcgcctccgccaggccacaacaaccccagccacagcaacagaggccgccggagcggaaggcgtgcggcggcttcatggacgccggctccagatccagcggcggcgcgggattcgacgacgacgatggcctcgctgcccgccgcgaggtctcctcctcgctcaaagaccacagagtggaggctaagggcgggagctgcagcggcagcgccggaacggaccagctgcccaacacgccacgctccaagcactccgccacggagcagcgcaggcgcagcaagatcaatgacaggtttcagatacttagagaaatcttgccgcaaaatgatcaaaagcgagacaaagcatcatttctcctagaggtcattgaatacatacggtttttgcaagagaaagtagaaaagcacgaggcttcacaaccagagtggaaccaagaaaatgcaaagatcatgccatggtctaacatctacttccggtcttcctggaaaaattcacagaacaaggacgaagtaaacggagatacaaccaccgatgcatcactagtcataaaaaatggctcctccccacggtttccttttgctgcaaagcctggggaccttaacaatgcagctgcgtttgaaactgcctcgggtgcacatgaacgggtagaactagaaccaaagggttgtgtgcctcgcaaagaagatgaaactcccaataatgttacaaataatgttgccacccagcaagcagcagaaacacagttgacaaatccgtcaccctcagacgacttggcaggcaacaatgggatgctgaacaaccctgagttggccatagatgaggggacaatcagcttgtcgagccaatattccgaaggcttgcttactaccttgaatcttgcgctgcaaaactcgggcgtagatttatcgcaagctagcatctcggtgcagatcaatctcggtaagcgggctatcaagaggtgcaatgatcctgggccaaaccccacttccaaggatctcatgaaccacatgtctcatgatcaagagattgggcagcagctaataaggtcaggggacggcgctagagaacgctcgcgggcaactaagcggcacagatcagagagataa

SEQ ID NO: 260 - DNA, 651 bp, Sorghum bicolor
atgtctgaccgcggcgggccggcgtcgccgcggtcggggaagcaccccttctaccgcggcatccggagccgcagcggcaagtgggtgtcggagatcagggagccgaggaagacgcgccgcatctggctcggaacgttcccgacggccgagatggccgccgtggcgtacgacgtggcggcgcgcgcgctgcgcggcgccgacgcggcgctcaacttcccgcacctggccgcgtcgcgccccgcgccggcgtccacgtccgcggacgacatccgcgccgcggccgcggaggccgccgcgtcgctgctgctgcagcaggagcagcagcagcagcccgccgatcatcaccagccgccggcccgtggcggcgctcctggacgcggcattgctcccgcggaggccggggcagcgcagcagcagaccggtgggagcagcgccgccgcctgggcgcagcaggaaggaggcagcggcgcggggaacccctacttcctggacgaggaggcgctgttcgagacgccgcagtacctgcgcaacatggccgcggggatgatgatgagccccccgaggttcggccgcaactcgtcggacgactcgccggaccacccgtcgtcgtcagatgccggggacagcctctggagctaccgtgatccgtag

SEQ ID NO: 261 - DNA, 267 bp, Triticum aestivum
atgtcttcttctgggtcaaggagcgcatcccgcggcggcgccaacccggagtggagcaagaaggagaacaagctgttcgaggatgcactcgcctactacggcgagggcacgcccgaccgctggctcaaggtgtcccgcgccatgggcggcaccaagacggccgacgaggtgcgccgccactacgagatcctcgacggggacatcaagctgatcgagtccggcagggtccctttccccaactacaacacccagggggcttggaactga

SEQ ID NO: 262 - DNA, 267 bp, Triticum aestivum
atgtcttctgggtcatcgtctcggagcacctcgccgagctccgactcggagtggagcaagaaggagaacaagatgttcgaggaggcgctcgcctactacggcgagggcgcccccaacctctgggacaaggtggccagcgccatggggggcaccaagtccgccgaggaggtgcgccgccactttcagatcctcatcgatgacgtcaacaacatagagtacggccgcatccccttccccaagtacaagacccaaggattctggacctga

SEQ ID NO: 263 - DNA, 294 bp, Triticum aestivum
atgagttcatcgtggacagcaaaacagaacaagatctttgagacggcgctagcgacgtatgacgaggacacgccagaccgctggcagaaggtggcacgagcagtcggtgatgggaagtcagtcgatgaagtgaagaggcactatgaagagctgctgaaagacctgcatcacattgagtatgcaggaggccgccgcggatccctctacaacatctccggcgctagcagtagcaacggcaactcctggggcagtgccaatgaggaccacaggagaaggtacctcaatcctcagtga

SEQ ID NO: 264 - DNA, 900 bp, Triticum aestivum
atgctcaagcagaagctcgagaaggacctcgccgccgtcgccatgtggagggcctctggtgccatgcctccagaacgttttgcagctaatccgtcattgccaaatgcagatgttcagcatataggcactattaatcccataggaggtaatgtggttccagttcaaaacaagctagctggtggcgcaagtggggtattgggtccacaattggtacaaaatgctgatgcccttgtaaagcaagccgctagctcttcttcgcgggagcagtcagaagatgatgatatggaaggagaagatgagatcactgggaatggggcccctactgatcaaagactgcggaggaggaagcaatccaatcgggaatcggccaggcgttcaagaagcagaaaggcagctcacctgaatgagctagaagcacaggtatcacagttaagagttgagaactcctcactgttaaggcgacttgctgatgttaatcagaaatacaatggtgctgctgtcgacaatagggtattaaaagcagatgttgaaaccttaagagcaaaggtgaagatggcagaggactcagtgaagcgggtgacaggcatgagcgctctgttccctgctggctccgacatgtcatccctcagcatgcccttcaccggctccccatcagaggccacctctgacgcggccgtcccagacgacctcagcgcttacttctccacaagcgaggccggaggtaacaacgggtacatgcctgagatggcttcctcagcgcaagaggatgacaatttcctcaacgaggccatggataccggcaagatgggcagacccgattcgctgcatcgtgtagcgagcctggagcacctccagaagaggatgtgtggcgggccggcttcgtccggatcgacctcatag

SEQ ID NO: 265 - DNA, 1011 bp, Triticum aestivum
atggggctggacgtcggcgagatcgggatgcccctcgacctgggcctcgacctcaagctcttcgtcgccaagaccgccggccggctcgcgaaggaggcgcccgccgtcgacgcctgcatccgcggcctcgaggaggagcgccgcaagatcgaggtcttccgccgcgagctgccgctctgcgcccgcctcctcgccgacgtgatcgaattcatgaaggaggaggcggccaagaggagcgagcgccgcgacgccgacgacaacgacaagcggaaatggatgagcacggcgcagctctgggtcgacacccgcgccaccgacgccgccgatcccgtcgtacagaaggagcagaagaaggagagctcgctgtccaagccgatgctgctcggcggtgccatcggtgcgccgatggcagtcagctgccgtgcaatgccgccgccggcggctccccagtatttcggcagggacgacaagattgttggctcacaaggcctgcttgctctgcccatgatttctccggctgcgaacaggcagttttctccccctgccgacgaccgtcatcaggccttcgccgcaaaatttgctgcccccatgccacctccggggcctggcttgcagactcatgaccagcagtcgaggaagacaaggcgttgctggtcgccggagcttcaccggcactttgttgccgccttgcaccaactcggtggccctcaagttgctactccaaagcaaatcagggaggtgatgaaagttgatggcctcaccaacgatgaagtgaaaagccacctccagaaataccgtctgcacaaccagaggtccccgagctcttcttcagccagccatccgattatgctggtgggagatctctgggctcatcaggagcaaagcagctcgcagtcccggtcccctgaaggcccccttcagctctctgtttcaggggtggccgtctcggcactcaccgtcagcgacagttccgaggaagatgacaggtcggtaggctatagccggaggtga

SEQ ID NO: 266 - DNA, 357 bp, Triticum aestivum
atggacgacatcaaggccatcagcgtgcagctcaacggccagcccgagatcgacctcaacggcggcaacaaaggcttctactccgaccactccatgaaccacagcgtatcctcctctgaggcggcggtggtcccggacgcggcggcggcgccggtggtgagccgcgggagggagcgggaggcgcggctgatgcgttacagggagaagcgcaagagccggcggttcgagaagaccatccggtacgcgtcccgcaaggcgtacgccgagacgcggccccgcgtcaagggccggttcgccaagcgcacgggcacggcggacgccgacggcctggaggagcacgaggagatgtactcctca

SEQ ID NO: 267 - DNA, 435 bp, Triticum aestivum
atgactcagaaatacaaggaagcttcccttggcaacaggaatcttacagttgatattgagactatgaggagaaaggtgaatatagctgaagaagctgtcaggagagtaactggagcaagcttgatgttctccactacatcaaacaacgtgcccttgtcttcatgtgtatctgttgcagcttctgctgatgctgttcccactgaggaaaacatgagccatttcctccagggtttacttgaagacaatctgatcaaacatgacctcccagaggtagcaacccctttgcccaatggggaagagatgacctcaaggccagcccctttgcaacgcgtcgcgagcctggagaacctgcagaagaggatccatagagattcagtgcacactgaggacacgtcgagtttcccggaccatgaagtccctgccaatggtaaataa

SEQ ID NO: 268 - DNA, 735 bp, Triticum aestivum
atggacatgggcatggatctttccagctcctccccgtcctcgtctgtgtcatccacgcccgagcacgcatcggggcgggcgtcgccggccaagcgccccacggggcgcaccaagttccgggagacgcggcacccggtgtaccgcggcgtgcggcgcaggggcaacgcgggacggtgggtctgcgaggtgcgcgtccccggcaagcgtggcgctcggctctggctcgggacgtacctgacggccgaggccgccgcccgcgcgaacgacgccgccatgctcgcactcggcggccgctcagcaaggtgcctcaacttcgcggactcggcgtggctgctcgccgtgccgtccgcgctctccaacctcgccgacgtccgtcgcgcggccctccaggccgtcgcggatttccagcgacgggaggctgccaatggcctgatagccaggaccgtcgccaaggaggccccatctagcgctcctgcacaatcgtcgtctgagtccgacagtgccgactcgtcggagacgtcggaagcttccgccgatggagagttcgaggtgctggctacaatggacatcgatatgttcagtaggcttgacttgttcccggaaatggacctgggctcgtactacgtgagcctcgcggaggcgctgctcatggacccgccgtcgacggcggccatcatggacgcgtactgggacaacggcgacggcggagcagatgtcgcgctctggagctactag

SEQ ID NO: 269 - DNA, 777 bp, Triticum aestivum
atggattaccaccagcaacaccagcagcagcaccagttcctgatgcccccgcccgcgtcgctgccggcgcagcagcagcagctgtgcgcgccgatgatgggcattgacatggacatggacatggacgagcagctgtgcttcatggggaggggcggcgtggggaggggggcggagaggaagcggcggttcacggaggagcagatacggtcactggagtccatgttccacgcgcaccacgccaagctggagccccgggagaaggcggagctggcgcgcgagctgggcctgcagccgcgccaggtggccatctggttccagaacaagcgcgcgcggtggcgctccaagcagctcgagcacgacttcgccgccctccgcgccgactacgacgccctccactcccgcgtcgagtccctcaagcaggagaagctcgccctcgccgcacagttgcacgagctgagcgagaggctgaggcagagggacggcggcagcggtggcgcggcgaccgccaccgccagcagcagcagctgcaacggaggcgggcaggagctggacgacgacaagaggaacgtcgtcgccgggtgcgtcgacgtcgagccccccgagagctgcgtgctcggcgggacgacgtgcgccacgccggcggacgtctcggtgtcggtggagtcggagtgcgacgaccacctccactacgacggggcggtcttcccggagtccttctgcgccacgcccgagctgtgggagccgtggccgtggccgcccgtcgagtggaacgcggtg

SEQ ID NO: 270 - DNA, 846 bp, Triticum aestivum
  misc_feature (616)..(616): n is a, c, g, or t
atgagcggcggcggcatggactcgtcgtcgtcgtcgtcctcgggcacggggggctccggcgcggcgccgttcgtggccaagacgtacgggatggtggacgaccgggcgaccgacgccgtcgtcgcgtgggggcccgccggcaacagcttcgtggtcgccgaccccttcgccttctcgcgcgcgctgctgccggcgcacttcaagcacgcaaacttctccagcttcgtgcggcagctcaacacctacggcttccgcaaggtggacccggaccggtgggagttcgcgcacgcctccttcctccgcggccagacccacctcctcccccgcatcgtccggcgccagagcagcaagcgcggcaaggatagcagggaggaggaggaggaggagagcagcagcgcggcgctggcgatggaggtggtgcggctgaggaaggagcagagggccacggaggagcgcgtggcggaaatgtggcgccgggtgcaggagacggagcgccggcccaagcagatgctcgccttcctcctcaaggtggtcggcgacccggacgtgctgcgccgcctcgcgggcggcccaggctcggggggcggcccggacgagggcgcggaggagggcaagnacgagggcgcggaggaggtcaagaggccgcggctgctgctcgacggggacggcgcgggggtggacggggggctactgtaccaccacagcggcaacctgatgaacctgggggaggccctggtgccggaggagccgagcgtggacatgtactacgccggaggcgacgggttcggcggcgtgcaggcggacggcgggcctccgtacgctttccacatggacaccggctactga

SEQ ID NO: 271 - DNA, 495 bp, Triticum aestivum
atgcaagatcagacggccacgacgacgagctcgccgccttccagcagcgacaggtcgtccagctccaactccaaggaagggatggacagcgacgacgacatagggagggtgccggagttccggctggaccaggggggaccatcgacgtcgggaagggaggcagcgtccgccgggacgtcgtcggagctcgcgcagtcggcgacggcggctgcccaggccagctcccgccgccgcggccgcagcccggccgacaaggaacaccggcgactcaaaagattgttgaggaaccgggtgtcggcgcagcaggcacgggagagaaagaaggcttacatgggcgagctggaggtgaaggtgaaggacttggagacgagaaactcggagctcgaggagaggctctcgacgctgcagaatgagaaccaaatgcttaaacagatactgaagaacaccaccggtaacaggagaggaccgggtagcggtgccggcggggacagctag

SEQ ID NO: 272 - DNA, 1365 bp, Triticum aestivum
atgagctcccatggtgttgttgccgtgaagccaatcgccacgccggacaaaaccacgcattcttatgcttgtggatccacacagtcttcagttcataagctgctggactctaaactggaccaccttgggctgttggatgataatctgtcatccaccagtcagtcatcagacatcaagaccgagctgatccgaacgtcgagcctgggaagaagcagcctgccatttaaccttcagagaagaagccctgagcctgatcctgaaagtccattgtctcatgtctcgcaccccaatttttcagagcccatggcctcaaactcttcaacgttctgcacaagtttattctcatcatctttgacaaactcggcgccttgccggcgaatgggtgctctgcctttcctgcctcaccctcccaagtatgagcagcaggttctcccagggcagtcatcaacctcctccctgcagctcagtggtgacacaggcaatgttcatgacgaggctgaacaggcagatgacataaaagacttcctcaatctttctgctggagatgcttctgatggcagcttccatggtgaaaaccaagcgtttgctttcgccgaggccgagcagatggagttccagttcttgtctgagcagctagggatcgccatcaccgataatgaggagagcccccaattagatgacatatacgacacgccgccgcctcaaatgtcgtcgcttccggtctcatcctgctccaaccagatcctgcagaatccaggatctccggctaaactgccgcttagctcgtcgcggtcatcttctggatctgcagcagctaacaagtcaagattgaggtggacactggagctccacgagcgtttcgtagaggcagtgaacaagctcgaagggcctgacaaagcaactcccaagggcgttctgaagcttatgaaagtggaaggcctgaccatctaccatgtaaagagtcatttgcagaagtaccgacacgcaaagtatattccagagatcaaagaagaaaagaaggcttcctcggaccttaagaaagtacaaccgggtagcagtggaagcgatccgttcaaaaacaagaacttggcagaagctctacggatgcaaatggaggttcagaagcagctccatgaacagctagaggtgcaaaggcagctgcagctacgcatagaagaacacgcgaaatacttgcagaggatactggaagagcagcagaaggtcggcagtggcagctcgctctcactgaaaaccccgacggagccgtccgagtcgacgtcgaaagacagaactgaacctgaagaggccaccacctcttcacctcagacgtccaagaacagcgagccagtggtcgccagtggatgc

SEQ ID NO: 273 - DNA, 945 bp, Triticum aestivum
atgtgcggcggcgccatcctagcggagctgatcccgccgtcggcgggccgtgcctcgaagcaggtggccgcgggccgggcctcgccaaagaaggccggcaagagcaaggggcataggtacggcagcgtcgccgatgtcgacgacttcgaggccgccttcgagaacttcgacgacgacctcgacctgcaggcggaggaggacggcgacgaacatgtcgtttttgcatccaagcctgcgttctctccggcctacgatgatggccgcgcggcgcaggcggcgagcaagaagaagagcgtccgccccctccacggcatccggcagcggccgtggggtaagtgggcggcggagatccgcgacccgcacaagggcacccgcgtctggctcggcaccttcgacacggccgacgatgccgcccgggcctacgacgtcgccgcccgacgcctccgcggcagcaaggccaaggtcaacttccccgacgcggccagggccggggcgcgcccgcgccgcgccagccgcagaactgcgcagaaaccgcagcgcccgcctgcgcggacgacggcgtactctgccaccgcagcaccacgcgcacggccggagcaggacgctatgatggtcaagcccgagcggatggagttttccgacgtggacgcgttcgtcgacctcaccgccgccgtcgccgtgctaccgcctgtcacggcgagctccttcgccgacaagatgccgagggtcgacgaggactcgtcggaggggagcggcggcggctccatgttggggttcgccgacgaccttgggttcgatcccttcatgatgctccagtacgaatccatggacagcctcttcgccggagacgccgtcatccaggatgcccgcggtgtggacggcggcatggacggcgtcagcctctggagcttcgaggagttccccatggacagcgccattttctga

SEQ ID NO: 274 - DNA, 291 bp, Triticum aestivum
atggcctctctgtcgatgagcgcggggtggacaccgaagcagaacaagctgttcgagcaggcgttggcggtgcacgacagggacacgcccgaccgctggcacaacatcgcccgggctgtcggcggcggaaagtcggcggacgatgtcaggcgctactatgagctgctcgtccatgacatcgcccgtatcgaggccggcaaggtgcctttccccgcctaccgtccaccatgccccggcaccggccacaacgccagctacgaggccgacaggttgaagcatttaaagatctag

SEQ ID NO: 275 - DNA, 1251 bp, Triticum aestivum
atgatgtgcagctccgatcatttcgacggtaataatcacttgtaccttcagcccaatcatcagagggggactgggggcatggaggcctgcgatctcgagaggattgggcacgagcagagccggcatggccaggaggcgggggagcatcggtcggacccgagcgcggcgctcaccacgtacctgaccttcctggagcacaagatcgggcacctccgcgggatcctctgctccacgccgcgccaccagcagcagcagcgcgccatcgtctccgccgagctccgctgcatcatcgtgcagctcgtctccatcgccaacgacctcgcctccgactccggcaccggcaacggtgtcggcgcggcggacgcgttcacgttcgagcgctgcgaggagaggtcgccgtcgctgtcgaacgccacccacgacgactccgacgaccacgccgatgccggcggcgaggaggaggaggaaggggatgggccgtacgaggtggtgcagatcgagaaggaggagatcctggcgccgcacgcgcactgctgcaaggtgtgcggcaaggggttcaagcgcgacgccaacctgcgcatgcacatgcgcggccacggcgaccagtacaaggcgcccggcgcgctcgccaggcccggctctccaacgccggcgaacgggaggcgcttcttctactcatgcccctacgccgggtgcaagcgcaacagggagcaccgggacttccagccgctcaagacccccgtctgcgtcaagaaccactaccgccggagccactgcgacaagagccacgtctgccgccgctgcggcgtcaagcgcttctccgtcctcgccgacctccgcacccacgagaagcactgcggccgcgaccgatgggtctgctcctgcggcgtctccttctccaggaaggacaagctcttcgcccacgtcgccatcttcgacggcggccacacgcccgctctgccgcccagcgacgacgaagccaccggccactgcaccgccgccacggccaccacgaccgccattgacagcatcgtgcccggctccactcagccgcttccggccggcagcgaagcgttgaacgtggtggaccagagcttctccggtcagatgctcgatggtctcagctgctccggcgccaaagggggcattgatgacgtcagagcaaagctctcctccccagtcggcattgacttctgtgactttgatggcttcgacctcttgggagcagttgcaatggacttcaatttctga

SEQ ID NO: 276 - DNA, 2697 bp, Triticum aestivum
atgatgtgttctcccctaccaccctcaccctgcaatccaaacacaaacgcgagcacatctgacacaaagatcttccctagaccccctccaccctccaatacttggttcacccaagatgcgcttcttggtttcgagcaggagaggagaagttctgaaggaagctttacctgtatggaaggtggggacgccccgccaggcatctccatggggcgcgccatgtcctcggaaggcgacctggacctcctggagcagctgctctccggcgacaacgcctggcttgaagtggcgcccaacacttctcgctcacccaactttttcgcttctccctccaccttcctctcagatgccacaaccaccaccacgatgccggcaagcacaaacaacgccctatggattcagtcaggctcttccaccgtccgggaaaggctcgaccaagctctggcttacataaaggagatgcagagagacgtcggcatgcttgtgcagctatgggtgcctatcaaaagcggtgaagggcagttagtgctatcaacgagcgggcagccattcactcttgatgagacctcagaaaggctcagacagttcagggaagtgtcgacacagtaccagttctctgcagatgttgcgtcggagtcctcgccgattgggctgccggggagggtgttcattggcaagctacctgagtggtcaccggatgttcgctacttcaccagctatgagtaccccagggtaaaccatgcacagtatttggacgtccatgggacgatggggctgccggtgtttgagaagggaagttactcgtgcttgggtgtcatggaactgatcatgaccaggcagaagctcaacttcacctctgagatcaacaacatatgcagtgccctccaggcagttaacctgagaagcacagaagtttcaaacattcctcgcgccacaaagttcaacagtgcttcctacaaagatgctctaccagagatactagaagttctaagagcagcctgcgtcacccacaagctcccattagctcagacctgggtcacatgtgctcaacaagggaagcggggcagccgccactccgatgagaactatcggcactgcatctccaccattgacgcagcatgctacgtcaatgatcctcagatgcagaacttccatgagtcctgctctgaccaccaccttctgcatgagcaaggggttgtagggaaagccttcaccacaaaccagccatgcttcttaccagacattggttcttcaactaaaatggagtacccattgtcccaccatgctaagatcttcaacttaaaaggagcagtggcaatccggttgaggtgcacgcggactggtacagcagactttgtgctagagttctttctgccaaccgactgtgaagccctcgaggagcagaaggcagtgctggactccttgtcaggcaccatgcgcagtgcttgccgaactctacgtgtggttacagacaaggagatggcggatgaggcaatgctggaagtgaatgagctgaactcatttggtcctcaagggaagaataaagttgaagagctgtcttttggagaccaagcaacagaacatagagaggaggcatcatggacaagtctagcagggacttcaaaagaatcagatttagctgaattaagtatacatggtatgctatcacctgtaggacagggcctatctccagctggtgctcagacaagtgcacaaggcagcaaagggaaaaggcgcacaaagacggagaagactgtgagcttgccggttcttcggcagtactttgctggtagcctgaaagatgcagcaaggagccttggagtgtgccctaccaccctgaaaagaatatgcaggcagcatggtataaatcgctggccatcacgaaagatcaagaaggtagaccattctctaagaaagctgcagcagatcattgattcagttcacggaggagagacagctttccagcttaataccctgtacaaggatctcacaaacacctctgtatcatctgacaacaatttgtcaggaagcgtcacagttcctccacacaagcagagcaatcttactgattttgaggggcaccgacaccacaggctaagcagtattgtgccatcaacctcacactcacactcatcatgcagccaaagttctgattcaagcccgtcatcgtgcagtggtggatcaacaaagcatccacctcaggctggagttgattttcttatgtcaggaaatcctgtaaatcacagccctgtccagactctgcaaacagaaaatgcatcaataagaggacatttcccagttcaggaggcaccagatctgttgcataatctgaaccaacaggctttaggtgggcagcattcttctcgaagcccatcacccccaaaacagaatgcagatgcaggtatgagaataaaggccacatttggctcggaaaaggtcaggttcagattgaagcctgagtgtagttttcaagaactgaagcaggagatggcaagacgtttgagtatagtagacacaagctttttgattgtaaagtacctggatgatgatttagagtgggtcttgatgacatgcgatgcagatttacaggaatgccttcatgtatataaactagcaaatctccaaacagtcaaaatttcagttcatctagctcctattccggaggcaagggtcactattggtcacactggtttgtcatga

SEQ ID NO: 277 - DNA, 1107 bp, Triticum aestivum
atggacgcgatgccgccggagggcattgtgaaggaggaggaggtgctgctgcacgaggagcgcacgcacccggcggccgcgccgccgcagcagcggcaggacggggcgctgccgcggccgatggaggggctgcacgaggccgggccgccgccgttcctcaccaagacgtacgacctggtggaggacccggccacggaccaggtcgtgtcctggggccgcgccggcaacaccttcgtcgtctgggacccgcacgtcttcgccgaggccctgctcccgcgcctcttcaagcactccaacttctccagcttcgtccgccagctcaacacctatggattcagaaaggttgatcctgacagatgggagtttgcaaatgaaggtttccttaggggtcagaggcatcttctcaagacgatcaagagaaggaagccgccatccaatgcgccctcatcacagcagcaggccctcacatcttgcctggaggttggtgagtttggatttgaggaagagattgacaggctcaagcgcgacaagaacctcttgatcacagaggtagtgaagctaaggcaggagcagcaagctactaaggataatgtgcaagccatggaaggcaggctacgagctgctgaacagagacaggcccagatgatggggttcttggcaagagcaatgcgtaacccacacttcttccagcaattagtccagaagcaagataagaggaaggagcttgaagatgccatctcgaagaaaagaaggcggcctatagacaatgctccattttatggttcgggggcaacaacaagtcagagcgagcaacttgattcacagttcctgtttgattctggtgtcctcagtgaacctggaatgaacgggatggagaatttagcgcagaacattcaggagcttgggcagggcaaaacagacgaggagaagaaggatgaagctaatgggcagctggacatcaacagcgatttctgggcagagctattttctgatgattttggagacgaagacgggtctgggctgtcagagttggagggaaggagacctgaagatatcgatgaactgggtcagcagttggggtatctgagttctactagcccgcagtag

SEQ ID NO: 278 - DNA, 1158 bp, Triticum aestivum
atgaattgtgtttccaacggcaccgtttatgaggaggcggttggacgagaagggagctgggccaggctgtgcgacggatgttgcgcggtgccaagcgtggtgtactgccgcgccgactccgcgtacctctgtgcatcttgtgatgcacagatccacgccgcaaaccgtgtggcctcgcgccatgagcgtgtgctcctctccgaggcctacaagcatgcaccagtggtgctggaatgtcatgcagatgctgcagcgttgtgcgccgcctatgaagcacaggtacactacacaaacctgcttgccacgatgcaccagcgcgtgcccgtggtgtcacacccggtcgcagccattccagctgcttctttatttgccgaggcagcagccaccgctcctgtcctcggcagcaaggaagaggacgcctcttggctgctgcccagcaaagattctgataaccataatcacagtggcaaccacagcagcagcagcagcagcagcagcagcagatattttggtgaagtggatcagtactttgaccttgtcgggtacaattcttactatgatagccacatgaacaaccaagagcagtatgtgatgcaagaacaacaacatctgcagcagatgcaaaaggagtacgcggagcagcagatgcaaaaggagtacgtggagaaggaagggagcgagtgcatagtaccttcgcagtctgcaattgtgagcaggccacatcagagtggttatgcaccacttgtaggggcagagcaggctgcctccgtgactgctggggttagtgcttacacagattccgtcaacaacagcatatctttctcaatggaggcgggtatagtaccggacaatacggtccagtccagcatcctgagaccagctggagccatcggtctcttctcaagtccttcacttcagacaccaattcacttcagctccaaggagagagaggccagggtcctcaggtacaaggagaagaagaagagcagaaagtttgagaagaccacacgttatgcaacaaggaaggcgtatgccgaagcacggccaaggatcaaggggcgcttcgccaaaagatcagatgcagacatggaagcggaccagacgttctcaactgcagccctatctgacagtagctacagtacagtcccatggttctga

SEQ ID NO: 279 - DNA, 549 bp, Triticum aestivum
gtcgatggggatcggagttcgacgcctcttctaatccgcttgcagaaatcgattgaccgctataaggcatatacaaaggataataatgttaataacaagacagtacagccagatatacagcaagtcaaagccgatactgtaagcttggcaaagaaacttgaagctcttgaagtttcgaagctaaagatcttgggcgaaaatttaggagggtgctctgctgaagaactgaactgtctggaagtaaatattgagaagagtctccgcaccatcagaggaaagaagacccaggtgctcgaacagcagatagctaacctgaaagagaaggagaggatgcttctcaaagacaacgaagacttgcgcggaaagcagcgcgaccttgaggcgtcgctggtggttcctgccctgaactgcgtcacgcccctgcagccacgtggccagctggcaccagagcaggaaccggtaccgagcgatgaggacgtggagacggagctctacattgggttgcccggggttcgctgctccaaccggcggtcaggtcaagccaaatag

SEQ ID NO: 280 - DNA, 1493 bp, Triticum aestivum
tgcgcggtaatactgtctgaaattccaggtcaacctcgtaggcatcttctaacaacaggctggagttcgtttgtcaacaagaaaaaactagtctccggggatgcagtcttatttcttcgaggtgatgatggtgaactaagattgggtgtacggagagcagttcagcttagaaatgaagccctttttaaagctgtcaacagtaatgaatcaaagctgcacacactatctgctgttgccagttccttggaaaatagaagtattttccatgtttgtttcgacccaaggagtggtgcatcagaatttattgtgccatattggaggttctctaagagcttgaaccattcgttttccattggaatgagatttaaagattccaatgagagtgatgatgcaaatgagaggtctactggattgatttcaggtattagtgaagttgaccccataagatggcctggatcaaaatggagatgcctacaggtaagatgggatgatggtaaccattgcaaccaccaacgcagggtttctccgtgggagattgagagagttggtggttcaatctcagttactgattgtctgtcggcatccagttcgaagcgagccaaattgtactttcctcaaggcaatttggatgctccagttaccgatggaaatggttatccggactcagtggaaactggaagcttccacagggtcttgcaaggtcaagaattgttgatgggctctagggctcatggcgctgcgcgctcccagtcgcccgacgtcgcaaagtttcgaactccggatcaccagcggttctccgcgaatgcgcggagctacatcccgcagcagagcccggtggagtttccctaccattcctcaggcttcggcgaatccctcaggttcccagaggtcttgcaaggtcaagaaatgtctcaagcacttcgcttctaccaaggaactgcttttgacgcccgcgcgcagcacggcggcgtcgtcggcccgttcggctacgcgcaacgatcagctgcgccgggtggactgtcgcctgcagctcagggctatgctctcgggcagttcacgccgtcggcggcggcggcggcgaaagtgtcctctccttcctccgtcctgatgtttaaccaggcgacggtcccgcagttcgacttggaaggcagagccagcagctacagaggcgcgtatggcggccagtgtcctcccgccatggagatggcgagggagacggaggaggcctggccgtgcgcacagcgccggacgccaagcgtgacggggacggggccgccggagacgtcgtcgggcggagcaactgccggctgtttgggttctccctgactgatcagaaggtgctgggaggagcaggtgagggtgatgccaaggaaggggacgcggatgatgtggtggcggagtgcgccgacccgcgggtgctcgacttgtttgggcgcggccaccctgctcccggcgctctgcatgccatcgtcgccgctcccctggggatgtga

SEQ ID NO: 281 - DNA, 837 bp, Triticum aestivum
atggacccggacatgggcgagaacttcgcatactactgggagacgcagcgctacctcgagtcagaggagctcgttgacagcatcttcgtcggggcgaccgaagacgccatctcgtactacgactccagctcgccggacggttcccactcgtcctcgacgccgatgggggcggccatgccaggggcggggatggggatgggcggcactggggcgaacaagaacatactgatggaacgcgaccgccgccgcaagctcaatgagaagctctatacgctccggagcgtcgtgcccaacatcaccaagatggacaaggcctcgatcatcaaggacgcgatcgagtacatccagcagctgcaggcagaggagcggcagatggaggcggaggtgtccgcgctcgagtccgccaccggcgcggaggatgactgcgacggcggcctctccgtggaccaggtctcctcggcgcagaggaagaaggtgaagcgcgcgctctcggtctcgtccatgaacgacgcgctgctcgccgcggcggcgacggtggcctcgccgcccgtggaggtcctggagctgcgcgtgtcggaggtgagcgagaaggtgctggtggtgagcgtgacgtgcagcaagcagcgcgacgccatgaccaaggtgtgccgcgcgctcgaggagctccgcctcagggtcatcaccgccaacatcacctccgtctccggctgcctcatgcacaccctcttcgtcgaggtagatgagatggaccgcttcgagatgaaggagacggtggaggctgctctctcgcagcttgactctacggggagcccgccgcttagttcgatgagctattag

SEQ ID NO: 282 - DNA, 702 bp, Triticum aestivum
atgagctgcaacgggtgccgcgtgctgcgcaaggggtgcagcgacgcctgcgtgctgcggcccagcatcgagtggatcgacggcgcccagccgcaggccaacgccaccgtcttcgtcgccaagttcttcggccgcgccggcctcgtcgcctccctcgccgccgtcccgctccaccaccgcccagccttgttccggtcgcttctgtacgaggcgtgtgggcggacgatcaacccggtgagcggcgccatcgggctcatgtggaccagcaactgggacctctgccaggccgccgccgaggccgtgctgcgcggcgactccctgcgctcgctctccgccgtgcccgccgccttcacggagcgcgacatggccggcctctacggcaacgtcggcaccaacaccggcagctcctcctccctccactcctcgccggagaactccacgtccgcgcccgccaggaagcggagcaagaacagccccggctgcggcgccgtaggagggcagcagcaggtgaagctgccggggccggggccggtgctgcagtcgtgcgagctggacctctgcctgacgcccttgtcgtcgccgctggccggcgggaggcgaggcggcgcgtcggacgagtactccaccacgacgtgctgcgaggaagccagcggcgacgcggcggaggccggggcgcccccgctgctgaacctcttcaactga

SEQ ID NO: 283 - DNA, 1524 bp, Triticum aestivum
atgggcatccaagggaacaaggggacgcacgacttcctctcgctctacgcccccgccgccgcggccgccgccaaggactcctctctccagctccacgactcgaagcctcccgccgcctcccaaggtttctttttgaagacgcacgacttcctgcagccgctggagaagccggcggcgtcggcaccgtccggcgcggacaggcagcagcagcagccgcagacgacgaagcacgcgctgccgggcggcatcggcacgttcagcgtcacccggcaggcgcccggagccgccggaccacagtcggccgccgccgccgcggtggtggtggtgaagcccgagccgccgccgttcgtgctctggggccagcccacggcgtcacaaccaccgagagcacaagggcaccaccaccagtggacgctccccttcgccggcgccgggcaggcggccaccgcgtccaggaagcacccggcggagaggaagcggcgcggcggcggcgggttcatggactctggctccagatccagcggcggcgccggcttcgacgacgacgacggcctcgccgcgcgccgcgaggtctcctcctcgctgcaagaattagctgtgagggtggatgccaagggcgggagctgcagtggcagcggcacggatcagctgccaaacacaccaaagtcaaagcattctgcaactgagcagcgccgccgtagcaagatcaatgacaggtttcagatacttagggatcttttaccacacactgatcaaaagagagacaaggcaacatttctcttagaggttattgaatatatacgatttttgcaagagaaagcacagaagtacgaggcttcatttccagagtggaaccaagaaaatgcaaagttgctcccatggtcaaacatgtattttcgatcatcttggaaaaatgcacagagtaaagggcaaatcgcagaagatgcctcgcctgacccttcacaattcatcagaaatggggcctcccctggattcaatatcacaggcaagcttgatgataaccacaccgcggtagcatctgcagctatctcaggggcaccggatcaggcagaaaccgaccacatggctagtgtgtcctgtagatcggcggacactccaacaaatattatgaataatgtttcgccacagtctcaaccacaatgggcaaatccatctggtgtggatgattgcgcggtgaacagtgacgtgttaaataaccaacaattgatgattgatgaaggaacaatcagcgtgtcaagccaatattcccaagagctacttaatacgttggctcatgctcttcaaagctcgggtatagatttgtcccaagccaacatatctgtccagatcaacctgggcaagcgggctgtcaaaagacctactgctggacaatcctccagttttaaggagcacatcgatctagccccgacgaacgaaatgatgggccatcagcagacgatgctgggcaacgccgccgaagagctaccgcacgcagcgaagcggtacaagccgggcaacacctga

SEQ ID NO: 284 - DNA, 279 bp, Triticum aestivum
cccgcggctgctggatccgcactgcagctgcagcagcagctgagcggaagcagtgccgccgctgcctcggcgagcggcgccgcccagcaggatcaagccggcattgggttcaatcagttcttcctggacgaggaggcgctcttcgagacgccgcagttcctgcgcaacatggccgccgggatgatgatgagccccccgaggctcagccccgactcttccgacgaatcgccggacccttccgaggctggggagagcctctggagctaccgcgacccgtag

SEQ ID NO: 285 - DNA, 759 bp, Camelina sativa
atgagctgcaatggttgccgtgttctccggaaaggttgcagcgagaactgtatcctccgaccatgtattcaatggattgaaaccgccgatgctcaaggccacgccaccgtcttcgtcgctaaattcttcggtcgtgctggtctcatgtcctttatctccgccgtaccggattctcaacgtcctgctttgtttcagtctttgttatacgaagcttgtggaagaacagtgaatccagtaaacggagcaatcggaatgttatggactggaaactggaatatttgccaagccgcggttgaaacggtgcttcgcggcggttctttgagacctatcccggagcttctcactcacggcggcggtttcgctgggtttccatctcctacatctgaagaagcttctgagatctgcactgagatgttgaatcttcagcagaataataatgattcaaccgatcgtaacatctaccatcactctcggttctccagctctagatctagatctaccatggattcttcttctcctccgaggaaacgtaagcgggtaacaacatcagaacaacaaccatcttcggagcttgatctatctctgatccctaaatcaacaacgccttcttctacacggcggcgatcagtaacaccgtcgatgaactcggaggactctgttacgaccaccactacggcgtcgttttgtgacaagggtgatgtgttgtacggaggaaacggaggaggtgaaacgagcaagctgcttaacctttttgtttaa

SEQ ID NO: 286 - DNA, 17369 bp, Artificial Sequence
  Synthetic construct pYTEN-25
catgccaaccacagggttcccctcgggatcaaagtactttgatccaacccctccgctgctatagtgcagtcggcttctgacgttcagtgcagccgtcttctgaaaacgacatgtcgcacaagtcctaagttacgcgacaggctgccgccctgcccttttcctggcgttttcttgtcgcgtgttttagtcgcataaagtagaatacttgcgactagaaccggagacattacgccatgaacaagagcgccgccgctggcctgctgggctatgcccgcgtcagcaccgacgaccaggacttgaccaaccaacgggccgaactgcacgcggccggctgcaccaagctgttttccgagaagatcaccggcaccaggcgcgaccgcccggagctggccaggatgcttgaccacctacgccctggcgacgttgtgacagtgaccaggctagaccgcctggcccgcagcacccgcgacctactggacattgccgagcgcatccaggaggccggcgcgggcctgcgtagcctggcagagccgtgggccgacaccaccacgccggccggccgcatggtgttgaccgtgttcgccggcattgccgagttcgagcgttccctaatcatcgaccgcacccggagcgggcgcgaggccgccaaggcccgaggcgtgaagtttggcccccgccctaccctcaccccggcacagatcgcgcacgcccgcgagctgatcgaccaggaaggccgcaccgtgaaagaggcggctgcactgcttggcgtgcatcgctcgaccctgtaccgcgcacttgagcgcagcgaggaagtgacgcccaccgaggccaggcggcgcggtgccttccgtgaggacgcattgaccgaggccgacgccctggcggccgccgagaatgaacgccaagaggaacaagcatgaaaccgcaccaggacggccaggacgaaccgtttttcattaccgaagagatcgaggcggagatgatcgcggccgggtacgtgttcgagccgcccgcgcacgtctcaaccgtgcggctgcatgaaatcctggccggtttgtctgatgccaagctggcggcctggccggccagcttggccgctgaagaaaccgagcgccgccgtctaaaaaggtgatgtgtatttgagtaaaacagcttgcgtcatgcggtcgctgcgtatatgatgcgatgagtaaataaacaaatacgcaaggggaacgcatgaaggttatcgctgtacttaaccagaaaggcgggtcaggcaagacgaccatcgcaacccatctagcccgcgccctgcaactcgccggggccgatgttctgttagtcgattccgatccccagggcagtgcccgcgattgggcggccgtgcgggaagatcaaccgctaaccgttgtcggcatcgaccgcccgacgattgaccgcgacgtgaaggccatcggccggcgcgacttcgtagtgatcgacggagcgccccaggcggcggacttggctgtgtccgcgatcaaggcagccgacttcgtgctgattccggtgcagccaagcccttacgacatatgggccaccgccgacctggtggagctggttaagcagcgcattgaggtcacggatggaaggctacaagcggcctttgtcgtgtcgcgggcgatcaaaggcacgcgcatcggcggtgaggttgccgaggcgctggccgggtacgagctgcccattcttgagtcccgtatcacgcagcgcgtgagctacccaggcactgccgccgccggcacaaccgttcttgaatcagaacccgagggcgacgctgcccgcgaggtccaggcgctggccgctgaaattaaatcaaaactcatttgagttaatgaggtaaagagaaaatgagcaaaagcacaaacacgctaagtgccggccgtccgagcgcacgcagcagcaaggctgcaacgttggccagcctggcagacacgccagccatgaagcgggtcaactttcagttgccggcggaggatcacaccaagctgaagatgtacgcggtacgccaaggcaagaccattaccgagctgctatctgaatacatcgcgcagctaccagagtaaatgagcaaatgaataaatgagtagatgaattttagcggctaaaggaggcggcatggaaaatcaagaacaaccaggcaccgacgccgtggaatgccccatgtgtggaggaacgggcggttggccaggcgtaagcggctgggttgtctgccggccctgcaatggcactggaacccccaagcccgaggaatcggcgtgacggtcgcaaaccatccggcccggtacaaatcggcgcggcgctgggtgatgacctggtggagaagttgaaggccgcgcaggccgcccagcggcaacgcatcgaggcagaagcacgccccggtgaatcgtggcaagcggccgctgatcgaatccgcaaagaatcccggcaaccgccggcagccggtgcgccgtcgattaggaagccgcccaagggcgacgagcaaccagattttttcgttccgatgctctatgacgtgggcacccgcgatagtcgcagcatcatggacgtggccgttttccgtctgtcgaagcgtgaccgacgagctggcgaggtgatccgctacgagcttccagacgggcacgtagaggtttccgcagggccggccggcatggccagtgtgtgggattacgacctggtactgatggcggtttcccatctaaccgaatccatgaaccgataccgggaagggaagggagacaagcccggccgcgtgttccgtccacacgttgcggacgtactcaagttctgccggcgagccgatggcggaaagcagaaagacgacctggtagaaacctgcattcggttaaacaccacgcacgttgccatgcagcgtacgaagaaggccaagaacggccgcctggtgacggtatccgagggtgaagccttgattagccgctacaagatcgtaaagagcgaaaccgggcggccggagtacatcgagatcgagctagctgattggatgtaccgcgagatcacagaaggcaagaacccggacgtgctgacggttcaccccgattactttttgatcgatcccggcatcggccgttttctctaccgcctggcacgccgcgccgcaggcaaggcagaagccagatggttgttcaagacgatctacgaacgcagtggcagcgccggagagttcaagaagttctgtttcaccgtgcgcaagctgatcgggtcaaatgacctgccggagtacgatttgaaggaggaggcggggcaggctggcccgatcctagtcatgcgctaccgcaacctgatcgagggcgaagcatccgccggttcctaatgtacggagcagatgctagggcaaattgccctagcaggggaaaaaggtcgaaaaggtctctttcctgtggatagcacgtacattgggaacccaaagccgtacattgggaaccggaacccgtacattgggaacccaaagccgtacattgggaaccggtcacacatgtaagtgactgatataaaagagaaaaaaggcgatttttccgcctaaaactctttaaaacttattaaaactcttaaaacccgcctggcctgtgcataactgtctggccagcgcacagccgaagagctgcaaaaagcgcctacccttcggtcgctgcgctccctacgccccgccgcttcgcgtcggcctatcgcggccgctggccgctcaaaaatggctggcctacggccaggcaatctaccagggcgcggacaagccgcgccgtcgccactcgaccgccggcgcccacatcaaggcaccctgcctcgcgcgtttcggtgatgacggtgaaaacctctgacacatgcagctcccggagacggtcacagcttgtctgtaagcggatgccgggagcagacaagcccgtcagggcgcgtcagcgggtgttggcgggtgtcggggcgcagccatgacccagtcacgtagcgatagcggagtgtatactggcttaactatgcggcatcagagcagattgtactgagagtgcaccatatgcggtgtgaaataccgcacagatgcgtaaggagaaaataccgcatcaggcgctcttccgcttcctcgctcactgactcgctgcgctcggtcgttcggctgcggcgagcggtatcagctcactcaaaggcggtaatacggttatccacagaatcaggggataacgcaggaaagaacatgtgagcaaaaggccagcaaaaggccaggaaccgtaaaaaggccgcgttgctggcgtttttccataggctccgcccccctgacgagcatcacaaaaatcgacgctcaagtcagaggtggcgaaacccgacaggactataaagataccaggcgtttccccctggaagctccctcgtgcgctctcctgttccgaccctgccgcttaccggatacctgtccgcctttctcccttcgggaagcgtggcgctttctcatagctcacgctgtaggtatctcagttcggtgtaggtcgttcgctccaagctgggctgtgtgcacgaaccccccgttcagcccgaccgctgcgccttatccggtaactatcgtcttgagtccaacccggtaagacacgacttatcgccactggcagcagccactggtaacaggattagcagagcgaggtatgtaggcggtgctacagagttcttgaagtggtggcctaactacggctacactagaaggacagtatttggtatctgcgctctgctgaagccagttaccttcggaaaaagagttggtagctcttgatccggcaaacaaaccaccgctggtagcggtggtttttttgtttgcaagcagcagattacgcgcagaaaaaaaggatctcaagaagatcctttgatcttttctacggggtctgacgctcagtggaacgaaaactcacgttaagggattttggtcatgcattctaggtactaaaacaattcatccagtaaaatataatattttattttctcccaatcaggcttgatccccagtaagtcaaaaaatagctcgacatactgttcttccccgatatcctccctgatcgaccggacgcagaaggcaatgtcataccacttgtccgccctgccgcttctcccaagatcaataaagccacttactttgccatctttcacaaagatgttgctgtctcccaggtcgccgtgggaaaagacaagttcctcttcgggcttttccgtctttaaaaaatcatacagctcgcgcggatctttaaatggagtgtcttcttcccagttttcgcaatccacatcggccagatcgttattcagtaagtaatccaattcggctaagcggctgtctaagctattcgtatagggacaatccgatatgtcgatggagtgaaagagcctgatgcactccgcatacagctcgataatcttttcagggctttgttcatcttcatactcttccgagcaaaggacgccatcggcctcactcatgagcagattgctccagccatcatgccgttcaaagtgcaggacctttggaacaggcagctttccttccagccatagcatcatgtccttttcccgttccacatcataggtggtccctttataccggctgtccgtcatttttaaatataggttttcattttctcccaccagcttatataccttagcaggagacattccttccgtatcttttacgcagcggtatttttcgatcagttttttcaattccggtgatattctcattttagccatttattatttccttcctcttttctacagtatttaaagataccccaagaagctaattataacaagacgaactccaattcactgttccttgcattctaaaaccttaaataccagaaaacagctttttcaaagttgttttcaaagttggcgtataacatagtatcgacggagccgattttgaaaccgcggtgatcacaggcagcaacgctctgtcatcgttacaatcaacatgctaccctccgcgagatcatccgtgtttcaaacccggcagcttagttgccgttcttccgaatagcatcggtaacatgagcaaagtctgccgccttacaacggctctcccgctgacgccgtcccggactgatgggctgcctgtatcgagtggtgattttgtgccgagctgccggtcggggagctgttggctggctggtggcaggatatattgtggtgtaaacaaattgacgcttagacaacttaataacacattgcggacgtttttaatgtactgaattaacgccgaattaattcgggggatctggattttagtactggattttggttttaggaattagaaattttattgatagaagtattttacaaatacaaatacatactaagggtttcttatatgctcaacacatgagcgaaaccctataggaaccctaattcccttatctgggaactactcacacattattatggagaaactcgagggatcccggtcggcatctactctattcctttgccctcggacgagtgctggggcgtcggtttccactatcggcgagtacttctacacagccatcggtccagacggccgcgcttctgcgggcgatttgtgtacgcccgacagtcccggctccggatcggacgattgcgtcgcatcgaccctgcgcccaagctgcatcatcgaaattgccgtcaaccaagctctgatagagttggtcaagaccaatgcggagcatatacgcccggagccgcggcgatcctgcaagctccggatgcctccgctcgaagtagcgcgtctgctgctccatacaagccaaccacggcctccagaagaagatgttggcgacctcgtattgggaatccccgaacatcgcctcgctccagtcaatgaccgctgttatgcggccattgtccgtcaggacattgttggagccgaaatccgcgtgcacgaggtgccggacttcggggcagtcctcggcccaaagcatcagctcatcgagagcctgcgcgacggacgcactgacggtgtcgtccatcacagtttgccagtgatacacatggggatcagcaatcgcgcatatgaaatcacgccatgtagtgtattgaccgattccttgcggtccgaatgggccgaacccgctcgtctggctaagatcggccgcagcgatcgcatccatggcctccgcgaccggctgcagttatcatcatcatcatagacacacgaaataaagtaatcagattatcagttaaagctatgtaatatttacaccataaccaatcaattaaaaaatagatcagtttaaagaaagatcaaagctcaaaaaaataaaaagagaaaagggtcctaaccaagaaaatgaaggagaaaaactagaaatttacctgcagaacagcgggcagttcggtttcaggcaggtcttgcaacgtgacaccctgtgcacggcgggagatgcaataggtcaggctctcgctgaattccccaatgtcaagcacttccggaatcgggagcgcggccgatgcaaagtgccgataaacataacgatctttgtagaaaccatcggcgcagctatttacccgcaggacatatccacgccctcctacatcgaagctgaaagcacgagattcttcgccctccgagagctgcatcaggtcggagacgctgtcgaacttttcgatcagaaacttctcgacagacgtcgcggtgagttcaggctttttcatggtagaggagctcgccgcttggtatctgcattacaatgaaatgagcaaagactatgtgagtaacactggtcaacactagggagaaggcatcgagcaagatacgtatgtaaagagaagcaatatagtgtcagttggtagatactagataccatcaggaggtaaggagagcaacaaaaaggaaactctttatttttaaattttgttacaacaaacaagcagatcaatgcatcaaaatactgtcagtacttatttcttcagacaacaatatttaaaacaagtgcatctgatcttgacttatggtcacaataaaggagcagagataaacatcaaaatttcgtcatttatatttattccttcaggcgttaacaatttaacagcacacaaacaaaaacagaataggaatatctaattttggcaaataataagctctgcagacgaacaaattattatagtatcgcctataatatgaatccctatactattgacccatgtagtatgaagcctgtgcctaaattaacagcaaacttctgaatccaagtgccctataacaccaacatgtgcttaaataaataccgctaagcaccaaattacacatttctcgtattgctgtgtaggttctatcttcgtttcgtactaccatgtccctatattttgctgctacaaaggacggcaagtaatcagcacaggcagaacacgatttcagagtgtaattctagatccagctaaaccactctcagcaatcaccacacaagagagcattcagagaaacgtggcagtaacaaaggcagagggcggagtgagcgcgtaccgaagacggtagatctctcgagagagatagatttgtagagagagactggtgatttcagcgtgtcctctccaaatgaaatgaacttccttatatagaggaaggtcttgcgaaggatagtgggattgtgcgtcatcccttacgtcagtggagatatcacatcaatccacttgctttgaagacgtggttggaacgtcttctttttccacgatgctcctcgtgggtgggggtccatctttgggaccactgtcggcagaggcatcttgaacgatagcctttcctttatcgcaatgatggcatttgtaggtgccaccttccttttctactgtccttttgatgaagtgacagatagctgggcaatggaatccgaggaggtttcccgatattaccctttgttgaaaagtctcaatagccctttggtcttctgagactgtatctttgatattcttggagtagacgagagtgtcgtgctccaccatgttatcacatcaatccacttgctttgaagacgtggttggaacgtcttctttttccacgatgctcctcgtgggtgggggtccatctttgggaccactgtcggcagaggcatcttgaacgatagcctttcctttatcgcaatgatggcatttgtaggtgccaccttccttttctactgtccttttgatgaagtgacagatagctgggcaatggaatccgaggaggtttcccgatattaccctttgttgaaaagtctcaatagccctttggtcttctgagactgtatctttgatattcttggagtagacgagagtgtcgtgctccaccatgttggcaagctgctctagccaatacgcaaaccgcctctccccgcgcgttggccgattcattaatgcagctggcacgacaggtttcccgactggaaagcgggcagtgagcgcaacgcaattaatgtgagttagctcactcattaggcaccccaggctttacactttatgcttccggctcgtatgttgtgtggaattgtgagcggataacaatttcacacaggaaacagctatgaccatgattacgaattcgagctcggtacccctactccaaaaatgtcaaagatacagtctcagaagaccaaagggctattgagacttttcaacaaagggtaatttcgggaaacctcctcggattccattgcccagctatctgtcacttcatcgaaaggacagtagaaaaggaaggtggctcctacaaatgccatcattgcgataaaggaaaggctatcattcaagatgcctctgccgacagtggtcccaaagatggacccccacccacgaggagcatcgtggaaaaagaagacgttccaaccacgtcttcaaagcaagtggattgatgtgacatctccactgacgtaagggatgacgcacaatcccacccctactccaaaaatgtcaaagatacagtctcagaagaccaaagggctattgagacttttcaacaaagggtaatttcgggaaacctcctcggattccattgcccagctatctgtcacttcatcgaaaggacagtagaaaaggaaggtggctcctacaaatgccatcattgcgataaaggaaaggctatcattcaagatgcctctgccgacagtggtcccaaagatggacccccacccacgaggagcatcgtggaaaaagaagacgttccaaccacgtcttcaaagcaagtggattgatgtgacatctccactgacgtaagggatgacgcacaatcccactatccttcgcaagacccttcctctatataaggaagttcatttcatttggagaggacagcccccaccatggcgtgcaggtcgactctagaggatccatggcaccgaagaagaagagaaaggtcgggattcacggcgttcctgcggcgatggataagaagtatagcattgggcttgacattggcacgaactccgtgggctgggccgtcatcaccgacgagtacaaggtgccgtctaagaagttcaaggtcctgggcaacaccgatcggcactcaatcaagaagaatctcattggagcactcctgttcgactccggagagacagcggaggccacgcggctcaagaggacagcgcgcaggcggtacacgcgcaggaagaatcgcatctgctacctccaggagatcttcagcaacgagatggcgaaggtggacgattcattcttccataggctggaggagtcgttcctcgtcgaggaagacaagaagcacgagcggcatccgatcttcggcaacatcgtggacgaggtcgcctaccacgagaagtacccaacaatctaccatctgcggaagaagctcgtggactcgacggataaggcggacctccgcctgatctacctcgccctggcgcacatgatcaagttcaggggccatttcctgatcgagggcgatctcaaccctgacaattccgatgtggacaagctgttcatccagctcgtccagacctacaatcagctcttcgaggagaacccgatcaatgcctctggcgtggacgccaaggcgatcctgtcagcgaggctctctaagtcacggcgcctcgagaacctgatcgcccagctccctggcgagaagaagaacggcctgttcggcaatctcattgccctctcgctgggcctcacccctaacttcaagtccaatttcgatctcgccgaggacgcgaagctgcagctctccaaggacacatacgacgatgacctcgataacctcctggcccagatcggcgatcagtacgcggacctgttcctcgccgcgaagaatctgtctgacgccatcctcctgtcagatatcctcagggtgaacaccgagatcacaaaggccccgctctcggcgtccatgatcaagcgctacgacgagcaccatcaggatctgaccctcctgaaggcgctggtcaggcagcagctcccagagaagtacaaggagatcttcttcgatcagtccaagaatggctacgcgggatacattgatggcggcgctagccaagaggagttctacaagttcatcaagccgatcctggagaagatggatggcacggaggagctcctggtgaagctcaatcgcgaggacctcctgaggaagcagcggaccttcgataacggcagcatcccacaccagatccatctcggcgagctgcatgcaatcctgcgccgccaagaggacttctaccctttcctcaaggataaccgcgagaagatcgagaagatcctgacgttcaggattccttactacgtgggaccactggccaggggcaatagccgcttcgcgtggatgacccgcaagtctgaggagacaatcacgccgtggaacttcgaggaagtggtcgataagggcgccagcgcgcagtctttcatcgagaggatgaccaatttcgacaagaacctgcctaatgagaaggtgctcccgaagcattccctcctgtacgagtacttcaccgtctacaacgagctcacaaaggtgaagtatgtgacggagggcatgaggaagccagccttcctgagcggcgagcagaagaaggcgatcgtggacctcctgttcaagaccaatcggaaggtgacagtcaagcagctcaaggaagactacttcaagaagatcgagtgcttcgattctgtggagatctcaggcgtcgaggaccgcttcaacgcctccctcggcacataccacgatctcctgaagatcatcaaggataaggacttcctggacaacgaggagaatgaggatatcctcgaggacatcgtgctgaccctcacactgttcgaggatcgggagatgatcgaggagcgcctgaagacatacgcccatctcttcgatgacaaggtcatgaagcagctcaagcgcaggcggtacaccggatggggccgcctgtcaaggaagctcatcaatggcatccgggacaagcagtcaggcaagacaatcctcgacttcctgaagtcggatggcttcgcgaaccgcaatttcatgcagctgatccacgatgactctctcaccttcaaggaagacattcagaaggcccaggtgagcggacagggcgactctctgcacgagcatatcgccaacctcgcgggctcaccagcgatcaagaagggcatcctgcagaccgtgaaggtggtcgatgagctcgtgaaggtcatgggcaggcataagcctgagaacatcgtcatcgagatggcccgcgagaatcagaccacacagaagggccagaagaactctcgcgagaggatgaagaggatcgaggaaggcatcaaggagctgggctcacagatcctcaaggagcacccggtggagaacacacagctgcagaatgagaagctctacctgtactacctccagaatggccgcgatatgtatgtggaccaggagctggatatcaacaggctctcggattacgacgtggatcatatcgtccctcagtcgttcctgaaggatgactccatcgacaataaggtgctcacgaggtccgacaagaaccggggcaagtcagataatgtcccgtcggaggaagtggtcaagaagatgaagaactactggcgccagctcctgaatgccaagctgatcacccagcggaagttcgataacctcacaaaggcggagcgcggcggcctctctgagctggacaaggcgggcttcatcaagaggcagctggtggagacacgccagatcacaaagcacgtcgcgcagatcctcgattctcggatgaacaccaagtacgatgagaatgacaagctgatccgcgaggtgaaggtcatcacactgaagtcgaagctcgtgtccgacttcaggaaggatttccagttctacaaggtccgggagatcaacaattaccaccatgcccatgacgcctacctcaatgcggtggtgggcacggcgctgatcaagaagtacccaaagctcgagtccgagttcgtgtacggcgactacaaggtgtacgatgtcaggaagatgatcgccaagtccgagcaggagatcggcaaggccaccgcgaagtacttcttctacagcaacatcatgaatttcttcaagacggagatcaccctggccaatggcgagatccggaagcgccctctcatcgagacgaacggcgagacaggcgagatcgtgtgggacaagggccgcgatttcgcgaccgtgaggaaggtcctctcaatgccgcaggtcaatatcgtcaagaagacagaggtccagacgggcggcttctcaaaggagtcgatcctgccaaagcggaactcggataagctcatcgcccgcaagaaggactgggatccaaagaagtacggcggattcgacagccctaccgtggcctactctgtcctggtggtcgcgaaggtggagaagggcaagtccaagaagctcaagagcgtcaaggagctcctgggcatcacaatcatggagcgctccagcttcgagaagaatccaatcgatttcctcgaggcgaagggctacaaggaagtgaagaaggacctgatcatcaagctccctaagtactctctcttcgagctggagaacggcaggaagcggatgctcgcctcagcgggcgagctccagaagggcaatgagctcgccctgccgtccaagtatgtgaacttcctctacctggcgtcccactacgagaagctcaagggcagcccagaggataacgagcagaagcagctgttcgtcgagcagcacaagcattacctcgacgagatcatcgagcagatctccgagttctccaagcgcgtgatcctcgccgacgcgaatctggataaggtcctcagcgcctacaacaagcaccgcgacaagcctatcagggagcaggcggagaatatcatccatctcttcacgctgaccaacctcggcgccccggccgcgttcaagtacttcgacacgaccatcgatcgcaagaggtacacatctacgaaggaagtgctggatgcgaccctcatccaccagtccatcacgggcctgtacgagacacgcatcgacctcagccagctcggaggtgacaagagacccgcagcaacaaagaaggcagggcaggctaagaagaagaagtgacaattcgctgaaatcaccagtctctctctacaaatctatctctctctattttctccataaataatgtgtgagtagtttcccgataagggaaattagggttcttatagggtttcgctcatgtgttgagcatataagaaacccttagtatgtatttgtatttgtaaaatacttctatcaataaaatttctaattcctaaaaccaaaatccagtactaaaatccagatctcctaaagtccctatagatctttgtcgtgaatataaaccagacacgagacgactaaacctggagcccagacgccgttcgaagctagaagtaccgcttaggcaggaggccgttagggaaaagatgctaaggcagggttggttacgttgactcccccgtaggtttggtttaaatatgatgaagtggacggaaggaaggaggaagacaaggaaggataaggttgcaggccctgtgcaaggtaagaagatggaaatttgatagaggtacgctactatacttatactatacgctaagggaatgcttgtatttataccctataccccctaataaccccttatcaatttaagaaataatccgcataagcccccgcttaaaaattggtatcagagccatgaataggtctatgaccaaaactcaagaggataaaacctcaccaaaatacgaaagagttcttaactctaaagataaaagatctttcaagatcaaaactagttccctcacaccgttaatcgccccgggggatcatgaaccaacggcctggctgtatttggtggttgtgtagggagatggggagaagaaaagcccgattctcttcgctgtgatgggctggatgcatgcgggggagcgggaggcccaagtacgtgcacggtgagcggcccacagggcgagtgtgagcgcgagaggcgggaggaacagtttagtaccacattgcccagctaactcgaacgcgaccaacttataaacccgcgcgctgtcgcttgtgtgcgtggccaagacgtaccgcagttttagagctagaaatagcaagttaaaataaggctagtccgttatcaacttgaaaaagtggcaccgagtcggtgctttttttgtcccttcgaagggcaattctgcagatatccatcacactggcggccgctcgaggtcgacggtatcgatcctaggttaatcgccccgggggatcatgaaccaacggcctggctgtatttggtggttgtgtagggagatggggagaagaaaagcccgattctcttcgctgtgatgggctggatgcatgcgggggagcgggaggcccaagtacgtgcacggtgagcggcccacagggcgagtgtgagcgcgagaggcgggaggaacagtttagtaccacattgcccagctaactcgaacgcgaccaacttataaacccgcgcgctgtcgcttgtgtgaattgctgatgatactagtcgttttagagctagaaatagcaagttaaaataaggctagtccgttatcaacttgaaaaagtggcaccgagtcggtgctttttttgtcccttcgaagggcaattctgcagatatccatcacactggcggccgctcgaggtcgacggtatcgatcctaggttaatcgccccgggggatcatgaaccaacggcctggctgtatttggtggttgtgtagggagatggggagaagaaaagcccgattctcttcgctgtgatgggctggatgcatgcgggggagcgggaggcccaagtacgtgcacggtgagcggcccacagggcgagtgtgagcgcgagaggcgggaggaacagtttagtaccacattgcccagctaactcgaacgcgaccaacttataaacccgcgcgctgtcgcttgtgtgcgtggatccagtcgatgctggttttagagctagaaatagcaagttaaaataaggctagtccgttatcaacttgaaaaagtggcaccgagtcggtgctttttttgtcccttcgaagggcaattctgcagatatccatcacactggcggccgctcgaggtcgacggtatcgatcctaggttaatcgccccgggggatcatgaaccaacggcctggctgtatttggtggttgtgtagggagatggggagaagaaaagcccgattctcttcgctgtgatgggctggatgcatgcgggggagcgggaggcccaagtacgtgcacggtgagcggcccacagggcgagtgtgagcgcgagaggcgggaggaacagtttagtaccacattgcccagctaactcgaacgcgaccaacttataaacccgcgcgctgtcgcttgtgtgctgaagccgaaccagcctgggttttagagctagaaatagcaagttaaaataaggctagtccgttatcaacttgaaaaagtggcaccgagtcggtgctttttttgtcccttcgaagggcaattctgcagatatccatcacactggcggccgctcgaggtcgacggtatcgatcctaggttaattaaggcgcgccaagcttggcactggccgtcgttttacaacgtcgtgactgggaaaaccctggcgttacccaacttaatcgccttgcagcacatccccctttcgccagctggcgtaatagcgaagaggcccgcaccgatcgcccttcccaacagttgcgcagcctgaatggcgaatgctagagcagcttgagcttggatcagattgtcgtttcccgccttcagtttaaactatcagtgtttgacaggatatattggcgggtaaacctaagagaaaagagcgtttattagaataacggatatttaaaagggcgtgaaaaggtttatccgttcgtccatttgtatgtg

SEQ ID NO: 287 - DNA, 693 bp, Triticum aestivum
atgagctgcaacgggtgccgcgtgctgcgcaaggggtgcagcgacgcctgcgtgctgcggcccagcatcgagtggatcgacggcgcccagccgcaggccaacgccaccgtcttcgtcgccaagttcttcggccgcgccggcctcgtcgcctccctcgccgccgtcccgctccaccaccgcccagccttgttccggtcgcttctgtacgaggcgtgtggccggacgatcaacccggtgagcggcgccatcgggctcatgtggaccagcaactgggacctctgccaggcggccgccgacgccgtgctgcgcggcgactccctgcgctcgctctccgccgtgcccgccgccttcacggagcgcgacatggccggcctctacggcaacgtcggcaccaacaccggcagctcctcctccctccactcctcgccggagaactccacgtccgcgcccgccaggaagcggagcaagaacaactgcggcgccgcagtagggcagcaggtgaagctgccggggccggggccggtgctgcagtcgtgcgagctggacctctgcctgacgcccttgtcgtcgccgctggccggcgggaggcgaggcggcgcgtcggacgagtactccaccacgacgtgctgcgaggaagccagcggcgacgcggcggaggccggggcgcccccgctgctgaacctcttcaactga

SEQ ID NO: 288 - DNA, 693 bp, Triticum aestivum
atgagctgcaacgggtgccgcgtgctgcgcaaggggtgcagcgacgcctgcgtgctgcggcccagcatcgagtggatcgacggcgcccagccgcaggccaacgccaccgtcttcgtcgccaagttcttcggccgtgccggcctcgtcgcctccctcgccgccgtcccgctccaccaccgcccagccttgttccggtcgcttctgtacgaggcgtgtggccggacgatcaacccggtgagcggcgccatcgggctcatgtggaccagcaactgggacctctgccaggccgccgccgacgccgtgctgcgcggcgactccctgcgctcgctctccgccgtgcccgccgccttcacggaacgcgacatggccggcctctacggcaacgtcggcacaaacaccggcagctcctcctccctccactcctcgccggagaactccacgtccgcgcccgccaggaagcggagcaagaacaaccctggctgcggcgccgcaggagggcagcaggtgaagctgccggggccggtgctgccgtcgtgcgatctggacctctgcctgacgcccttgtcgtcgccgctggccggcgggaggcgaggcggcgcgtcagacgagtactccaccacgacgtgctgcgaggacgccagcggcgacgcggcggaggccggggcgcccccgctgctgaacctcttcaactga

SEQ ID NO: 289 - protein, 88 aa, Panicum virgatum
MSGSRSSSSRSVNVDSTWSKKENKLFEEALAYYGDDTPDRWHKVSRAIGGSKTADEVRRHYELLDEDVKLILSGNVPFPKYNTQGPWN

SEQ ID NO: 290 - protein, 87 aa, Panicum virgatum
MAGSRSSSPNSNSTWSLKENKMFEEALAYYGEGAPNLWDKVSSAMGGTKSAEEVRCHYEDLVDDVKMIESGRVTYPKYKTQGFWTGG

SEQ ID NO: 291 - protein, 97 aa, Panicum virgatum
MSSSWTDDQNKLFESLLAIYDKDTPDRWQKIARAVGGGKSVEDVKRHYHKLQTDLQDIESTGGCPGSNRSSSGGSSSNGSSCGKANDDKRTRYLKPQ

SEQ ID NO: 292 - protein, 408 aa, Panicum virgatum
MDHVISMEEILDPFWDLPPPEKSLVTGDGVIDGVVTNGDGGCGNTVDQSSSEWSFERLLEEELLADASAVENSSSGSALHAEPVVEVDHAVMAPMEISGLGNAMEYNTILKRKLEEDLATVAMWRASSVVPPARSQGSTNYIGGNRNPVENKSTSGEEGPINRVQNAYIRARFAATCSSSREPSPSDEDDMDGEVEILGFKLPTEEKVRKRKESNRESARRSRYRKAAHLKDMEDQVAHLRVENSSLLRRLAALNQKYTDATVDNRVLKADMETLRAKVKMAEDALKRVTGGMSSSQPSMPLQVPASTDASGPILDNIIDYLMSSTDATADNNFVPRTTAPAPLQAENPTSNGTSNSVMLNQIAAHHAVAVELLHNRLGAMPTSSDSTSPESVPSGVDESMSMDASMH

SEQ ID NO: 293 - protein, 349 aa, Panicum virgatum
MGLDVAEIGMGLDLGLDLRLFAARSAVGMAAAAAKGAPAGIEACIRSLEEERRKIEVFRRELPLCVRLLADVIEELKEEAARKGGDLELRPDDGDKRKWMSTAQLWVDSDATSKSEKEQPSEMTSPEPKLLGGPMPIRAVPVVPPPPPPGFRRDDNAAGTARLPGLSLLPPAAKTSVSPVPAVDEHRQNAAARLSATMSPSGSGLNLHTQTQQQQQLARKTRRCWSPELHRQFVAALHQLGGPQVATPKQIREVMQVDGLTNDEVKSHLQKYRLHNRRSPGMAPVSQSIVLVGGLWSSQEQSSSQSQSGSPQGPLQFSGSGMAVSAATVGGDSSSSDEDDKSDEGYSRK

SEQ ID NO: 294 - protein, 142 aa, Panicum virgatum
MDGIKAIGVPVAPPELDMATGGYYYPEHSMNHSVSSSEVAVVPDAPAVPAASRGKEREARLMRYREKRKNRRFDKTIRYASRKAYAETRPRIKGRFAKRCSSAEAEAEAEDEALLEHEEAACFSPAASAPAASSDGVVPSFC

SEQ ID NO: 295 - protein, 144 aa, Panicum virgatum
MGRMMALVQWTQKLRLRVGHPGHPYNIAEEAVRRLTGTTLLLSTKCDKTASSMRLTSYPSDAGSASVAIEDSMEHFLQAPLQSDPIKLDHPNAAILLTRREMGTKPDSLQRVASLEDLQKRIHRDSIHSETASTFSDPEALANG

SEQ ID NO: 296 - protein, 224 aa, Panicum virgatum
MEYDEQESPEAAAGEEYATVMSAPPKRPAGRTKFRETRHPVYRGVRRRGPAGRWVCEVREPNKKSRIWLGTFATAEAAARAHDVAALALRGRAACLNFADSARLLRVDPATLATPEDIRRAAIELAEGSAQQDAAAAVASSSSGADAAAPMAMAMHHQQDAAPYDYAAMYGNMDFDQPYYYDGMGGAAAIGGNDWQAGWHVDADDDGAAAAGCGSDMTLWSYYD

SEQ ID NO: 297 - protein, 196 aa, Panicum virgatum
MFQAHHAKLEPREKAELARQLGLQPRQVAIWFQNKRARWRSKQLEHDYDALRDKFDALHARVESLKQEKLALAAQLQELSERLREREDHRAASGGVAATASSSSCNGGEEEAEDDKRNVVLRCVDMEPPESCVLAGACATPPADVSVESECDDHHRLDYDDGLFPESFCATPELWEPWPLVEWMRSPETVAEASST

SEQ ID NO: 298 - protein, 273 aa, Panicum virgatum
MASAEAAAGVAPFVAKTYRMVDDPSTDAVVAWGRDSNSFVVADPFAFSQTLLLAHFKHSNFSSFVRQLNTYGFRKVDPDRWEFAHVAFLRGQTHLLPQIVRRGGGGGGKRKDDGSSCGANAGAAADEDAVAMEVVRLRREQRAIEDQVAAMWRRVQETERRSKQMLAFLLKVAGDPQVLRRLVSSTAAGSGGGGGGAVRFAAAAPEGERGAAGEVAAKRARLLLDDAPVYGAGAGPSAADLGAGFYGAGGEDLGFGAKAAGGYLQPPPYVLLR

SEQ ID NO: 299 - protein, 169 aa, Panicum virgatum
MQQDQTTSSLPSSSECSSSSAPQTEEAREGMESDEEIGRVPEVGLELAGPSTSGRETAAGAGAGTSSEAQAASAAAARRRVRSPADKEHRRLKRLLRNRVSAQQARERKKAYLSELEVRVKDLEKRNSELEERLSTLQNENQMLRQILKNTTVNRRGPGGGSSAGGDSQ

SEQ ID NO: 300 - protein, 472 aa, Panicum virgatum
MSSQSVATGEQIIAPNQIVHACTSTQTSVHKLFDAKLDHGFLIDDTLSSTSQSSNIKTELIRTSSLSRSLSVNLQKRSPESDPESPLSHVSHPKFSDPILSNSSTFCTSLFSSSSKNTDPCRQMGTLPFLPHPPKCEQQVSAGQSSSSSLLLSGDTGNALDEAGQSDDLKDFLNLSGDASDGSFHGENNILAFDEQMEFQFLSEQLGIAITDNEESPHLDDIYGTPPQLSSLPVSSCSNQSKQNLGSPVKVQLSSSRSSSDSATTNKSRLRWTLELHERFVEAVNKLEGPEKATPKAVLKQMKVEGLTIYHVKSHLQKYRLAKYLPEPKEDKKASSEDKKAQLGSSSSDSSKTKNLQVAEALRMQMEVQKQLHEQLEVQRQLQLRIEEHARYLQKILEEQQKAGNLSMKAPTEAQAGSPETTSKERSESEGGTTSPRPSKNRNPDVDAECKSPGGSKRTKVQVDPERVAPCS

SEQ ID NO: 301 - protein, 322 aa, Panicum virgatum
MCGGAILAELIPSPRRAASKPVTAGHLRPAGSDSKKAGSGRSKRHQLADVDDFEAAFEDFADDFDEEEVEDGHHFVFSSKSAFSPAHGGRAAPATQKKRGRRHFRGIRQRPWGKWAAEIRDPHKGTRVWLGTFNTAEDAARAYDVEARRLRGSKAKVNFPAAGARPRRGNAPRPQRHHAAAQPALLAGEKQREEEVVVKPEIGASFDVGSFFDMTFSAFPAAAPAMESSFTGSAGSESGSPAKKMRYDNDSSDGMSSGGGSALELADELAFDPFMLLQMPYSGGYESLDGLFAVDAAQDVNNGMNGVSLWSFDEFPDDSAVF

SEQ ID NO: 302 - protein, 100 aa, Panicum virgatum
MASLSMTSSSVRAQWTKKQNKLFEQALAVYDKDTPDRWHNIARAVGGKSAEEVRRYYEMLEEDVKHIESGKVPLPAYRCPGGAGAGALGYEADRMKHLKI

SEQ ID NO: 303 - protein, 378 aa, Panicum virgatum
MEVWNNVESSMEVHRELHDHSQEAGGSGSDDPRTTVLTYLTFLEHKIAHLRGIICSAPQPPRQIVSAELSCIAVQLVSISNSLAAASGATAEEDAKSPPRAATPSEGDSDSSDDERLPPAGSYEVIELGKEEILAPHVHSCKVCGKGFKRDANLRMHMRGHGEEYKTAAALAKPGRDAPPPASAARCFYSCPFVGCKRNREHKSFQPLKTAVCVKNHYRRSHCDKSYTCRRCNVKRFSVLADLRTHEKHCGRDRWVCSCGTSFSRKDKLFGHVAAFDGHAPALPPEEDDAADHSAANGLGNASDQMLMGTEAVSRMANDQECFSDSIFDDLSCSDIKGFALTDRQCLDDGRGSLSPMDLYSCDFDGFDLFGAPGIADF

SEQ ID NO: 304 - protein, 883 aa, Panicum virgatum
MSPWFPSPRCAWRHGASPLHLQQGRNPESLTCMEGGGGDPQPSVSLQARTPSEGGAAVDLDLLEQLLSGDNGWFEVVSRSPNSLASPPPAAFFSADVTATAAAATTQAASSWWIQTGGASPSSVRERFNQALSYIRETQSDGDVLVQLWVPVNRGDGQLVLTTSDQPFTLDQRSDSLIRFREVSTKYQFSADVKSGDSPPGLPGRVFIGRLPEWSPDIRYFTSYEYPRVRDAQHLDVHGTMGLPVFEKGSYNCLGVIELIMTRQKLNFTSELNTICSALQAVNLRSTEVSSVPRRQFSTASYKDALPEILEVLRAACLTHKLPLAQTWVTCAQQGKRGSRHSDENYQYCISTIDEACFVNEPKMQDFHDACSEHHLLRGQGVAGKAFTTNQPCFLPDIGSSTKQEYPLSHHAKIFDLKGAVAIRLRCTRTGTADFVLEFFLPTDCEALEEQKAVLDSLSGTMRSVCQTLRVVTDKEMEDEAMWEMNELNSFTPQGKNKVEELSFGGNSADRRGEASWTSLAETSQQESELAALRMHGMFSSGGQGPSLSGVQATAEGSKTKRRTKAEKTVSLQVLRQYFAGSLKDAARSLGVCPTTLKRICRQHGITRWPSRKIKKVDRSLRKLQQIIDSVHGAETSFQLNTLYKDLTNTSISSENNLSGSNTIPPTNQSNLTNFDKHQHHKSNSIVPSTSHSHSSCSHNSDSSPSCSGGATKHAPQVIIDLMKSGNPVKDSPIQTLQTENTSLYEHFSVNEAPKDLPQDVTEKANGGLHSKRSPSSPKQNAEANMRVKATFGSEKVRFRLNPECNFQELKHEIAKRLSIVDTSSLILKYLDDDSEWVLMTYDADLQECLHVYKLADIQTIKISVHLAVSPATRVTTGHTGLS

SEQ ID NO: 305 - protein, 361 aa, Panicum virgatum
MEPSAAAAGIVKEELLEQQPLQDGVRGGDAPRPMEGLHEVGPPPFLTKTFDLVEDPATDAVVSWSRAGNSFVVWDPHVFADALLPRLFKHSNFSSFVRQLNTYGFRKVDPDRWEFANEGFLRGQRHLLKTIKRRKPPSAVPQSHQQQASASCLEVGEFGFEEEIDRLKRDKNILITEVVKLRQEQQSTKDHVRAMEERLRMAEQKQVQMMGFLARAMRNPEFFQQLVQQQDKRKELEEAISKKRRRPIDNTPFYSPGETSQSEQLDSQFKFDSGVLDGLSEPGMPELENLAVNIQELGKGSTDGAKMDQANGHSELNDDFWADLLIEDFGDKAGQSELEGRPEDVEDLAQQLGYLSSSSPK

SEQ ID NO: 306 - protein, 376 aa, Panicum virgatum
MNYNFDGNAVEKEVGGGGEGSCPWPRPCDGCRAAPSVVYCRADAAYLCASCDTRVHAANRVASRHERVRVCEACECAPAVLVCRADAAALCATCDAKVHSANPLAGRHQRVPVVPLPTAAIPAASVLAEAAATPVAIGDKEEEVDSWLLLSKDSDDDNNKNISTRNNISSNNMYFAEVEEYFDLVGYNSYCDNHINSTEQYGMQERQQQLMQKEYGDKEAGECVVPSQVAMAKEQQQSGYGVVGAEQAASITAVVSAYTDSISNSISFSSMEPMEVGIVPDNMATDMANSSVLTHAGAISLFSGPSLQMPLHFSPMDREARVLRYKEKKKNRKFEKTIRYATRKTYAEARPRIKGRFARRSDMEIEVDQMFLTAAV

SEQ ID NO: 307 - protein, 152 aa, Panicum virgatum
RNLSNKAIQQQDIQQVKADALSLANRLEALEKSKRKFLGENLEDCSIEELHSLEVKLEKSLHVIRGKKTQLLEQQIAKLKEKERTLLKDNKELREKQRDVQPPPVAPAVTRCLPPWPRNLPAPCNDDVDVETELYIGLPGRERSANRDSGSG

SEQ ID NO: 308 - protein, 344 aa, Panicum virgatum
LQVKWDGDTNCNHQNRVSPWEIERVGSSISVPHCLSSSVSKRTKLCFTQGDLDAPILDGNGRPDSLETECLHRVLQGQELVRSRTHGAACSHSSDTPKCQGSYERRFSDDVWNCKMNDAMSGLRDQNATGFAYQPLGFSESVRFPEVLQGQEMSRAVPSFLGAAFGARIQNGRIGSFDVQRTAGTQGYPLQQFSLLATEAHSPSSVLMVNQTTVLQPELQGMANLEQANGSPYAHIATQREAETWPSTQQQRASETGSELFNTAEASAPAAVAKSGLADKGVRRSSCRLFGFSLTDEILVAEEDGGKENYEAPQTPRVLDLFGHSQSTPSALPLHALCAAPLGI

SEQ ID NO: 309 - protein, 249 aa, Panicum virgatum
MDPAIGDSLECLLWDCLESEALQSLCIGAGAGGGSSQQHRDGYSSAPDADSNSSAATAGAGSIGSRPGSSIVVTERRRRRRLNDRLYALRSVVPNITKMDKASILGDAIEYILQLQQLERQLLAELALLEAGAGAHHLLVGTPMPSAGTGEDDVRAGHAAVSPTKRVKRSPSLSSPAASRHSPSSPPVDALQVRVSGAGDKVLVVSVACRHRRDAVAKLCRALEGLRLCVIAANVTAASGTVTHTVLVP

SEQ ID NO: 310 - protein, 241 aa, Panicum virgatum
MSCNGCRVLRKGCSDACVLRPSIEWIDGAQPQANATVFVAKFFGRAGLVASLAAVPLHHRPALFRSLLYEACGRTINPVSGAIGLMWTGNWDLCQAAADAVLRGESLRALSAIPAAFTDRDMDGLYGSVGAAASSSSPENSSSAPSRKRGRNNNNGGLAFVNAAAAAAVPAAGACQNPPAGLLQSCELDLCLTPASSPMAGSGRRGCGGASDEYSATTTCEDLQATGDVEARAPALLNLFH

SEQ ID NO: 311 - protein, 416 aa, Panicum virgatum
MELRHCCPPCVAAPGLLHRAIELRHCCRLSPAPEKIMWKKSHPWSLPFAARCVAVASARPQPQQQQQRPPERKAGGGFMDVGSRSSGGAGFDDDDGLAARREVSSTLKELSVRVETKGGSCSGSAGTDQLPNTPRSKHSATEQRRRSKINDRFQILREILPQNDQKRDKASFLLEVIEYIRFLQEKVQKYEVSNPEWNQENAKIVPWSNIYFRSSWKNLQNKDEINGDMASDPSQVIKNGLSPRFPFAAKPEDHNNAGAFETASGAQELAEPKGCVPFKPAETPSKITNTVASQQPTQLTNPLPSDDCAAPNGMLSNPELAIDEGTISLSSQYSQGLLTTLNLALQNSGIDLSQASISVQINLGKRATKRSAPGSNSTSKNLINQASRDQEIGHQLRSGDGAREHSQATKRHKSDR

SEQ ID NO: 312 - protein, 200 aa, Panicum virgatum
MSDHGGPASPRTGKHPYYRGIRSRSGKWVSEIREPRKTRRIWLGTFPTAEMAAVAYDVAARALRGPDTVVNFPDLAASRPAPASTSADDIRAAAAEAAAALQEPDRRRARGIAPAAAGGDAQQQQTAGGSSGAAPQQEGGGSGAGSHYFLDDEALFETPQYLRNMAAGMMMSPPRLGHNSSDDSPDPSEAGDSLWSYRDP

SEQ ID NO: 313 - protein, 88 aa, Zea mays
MSGSRSSSSHNVTIDSEWSKKENKLFEEALACYGAGTPDRWHKVARAMGGIKTADEVRRHHEILNEDVTLIESGRVPFPNYNTQGAWN

SEQ ID NO: 314 - protein, 87 aa, Zea mays
MSASRSSSPNSMSQWSQKENKMFEEALAYYGEGTPNRWDKVSSAMGGIKSAEEVRCHYENLDYDVKMIESGNVPYPKYKTQGFWTRG

SEQ ID NO: 315 - protein, 96 aa, Zea mays
MGSSWTESQNNLFERALAVYDKDTPDRWHNVARAVGCGKTAEDVKRHYKYLKTDVKHIETEEGGRGSQSSSPAGAGAGGSGSSSSSSWGRDNGDKR

SEQ ID NO: 316 - protein, 410 aa, Zea mays
MERVFSMEEIPNPYWAPPHPQPAAGGAVAAPGGVGGAGDAAGAMNRCPSEWYFQKFLEEAVLDSPGPVAGVGRSSGQAGVEAAESKPLGAAAPASVSSSVVDPVEYNAMLKQKLEKDLAAIAMWRASGAAPPDLSATAASLPSVGAPHAAPLKPVGGTESLVQNMLAGAPVGGSGPHVVQIADIPVKQTTSSSSREQSDDDDMEGDAETNGNGNPVQQRQQRRKQSNRESARRSRSRKAAHLNELEAQVAQLRVENSSLLRRLADVNQKFNEAAVDNRVLKADVETLRAKVKMAEDSVKRVTGMNALYPAVSDMSSLSMPFNGSPSDSASDSTVPVQDDLNSYFANPSEIGCNNGYMPDIASSVQQDDNFVNGYQAAGKMGRTDSLQRVASLEHLQKRMCGGPASSGSTS

SEQ ID NO: 317 - protein, 338 aa, Zea mays
MGLDVGGIGMGLDLGLDLGLFAARSAGGMAAAAKGAPAEIESCIRSLEEERRKIEVFRRELPLCVRLLADVIDELKDEAAKRGGDAEAKADDGDKRKWMSTAQLWLDSDAKSDESDKEQLSEITSPEPKLLGGAPMPIRAVAAVPPLPPPFFRREDSSAGSGLSLVPPAAKPPIPPMSASDNASGRFCATMPPSGSGANLHSQAQQQARKARRCWSPELHRLFVAALHQLGGPQVATPKQIREVMKVDGLTNDEVKSHLQKYRLHNRRSPGVVAPVSQSVMLAGGLWAPPHQEQSSSQSGSPQGPLQFSGSGVAATVGGDSSSSDEDDKSEGYSRKYV

SEQ ID NO: 318 - protein, 335 aa, Zea mays
MDTAAELELGLELEQKPAAGYWSVVGARPCDACAAEPARLHCRADGAFLCPGCDARAHGAGSRHARVWLCEVCEHAPAAVTCRADAAALCAACDADIHSANPLARRHERLPVAPLFGALADAPQPFPSPAFAAAAGAEAPAQGEAVAEDYGSSEAEAASWLLPEPDNSHEDSAADTFFAESDAYLGADLDFARCMDGVKAIGVPVAPPELDIGAGSFCYPEHSMNHILSSSSEVAVVPDAQAAGLPVVVVVSRGEEREARLMRYREKRKNRRFDKTIRYASRKAYAETRPRIKGRFAKRRSAEGEDEALEHEEGACFSPTGSAPAASDGVVPSFC

SEQ ID NO: 319 - protein, 310 aa, Zea mays
MAGGGAGDDDVVVVSCGGRGGGDPGAYAAVLKRKLDLYCAAVAKSMEAKSQEHSLGYPNSQASDASQLISQASFDGDIDGASLVTNSNVIEDDDFQGKPTNSGTSKELSDDDGDLEENTDPANAKKMRRMVSNRESARRSRKRKQAHLTDLESQVSRLTSENASLLKRLADMTQKYKDASVDNKNLTVDVETMRRKVNIAEEAVRRLTGITLMLPTAFEKPTSSAPLSSCPSDAASASASAAIEDSVKHFLQAPLENSGIIPNAAVFQTKPASLHRVASLENLQKRIVGDAMYSETASTTFSDPEALADR

SEQ ID NO: 320 - protein, 232 aa, Zea mays
MEYAAVGYGYGYGYDERQEPAESADGGGGGDDEYATVLSAPPKRPAGRTKFRETRHPVYRGVRRRGPAGRWVCEVREPNKKSRIWLGTFATPEAAARAHDVAALALRGRAACLNFADSARLLQVDPATLATPDDIRRAAIQLADAASQQDETAAVAADVVAPSQADDVAAAAAAAAAMYGGGMEFDHSYCYDDGMVSGSSDCWQSGAGAGGWHSIVDGDDDDGASDMTLWSY

SEQ ID NO: 321 - protein, 261 aa, Zea mays
MDRPDHQQQQFFMPTTVQVPQPQQQQQQLCVPMLDEPPSSFLAGRGGGGASGRGERKRRFTEEQIRSLESMFHAHHAKLEPREKAELARELGLQPRQVAIWFQNKRARWRSKQLEHDYALLRAKFDDLHAHVESLKQDKLALTTQLSELSERLRERDDRAAAAGGGGRETMASSSSCIGGGGEEEAEDDKRNVLLFGCVDMEPPAESCVLVGSTCAALADVSVESECDDQHLHYDDEFPESYCAMPELWEPWPLVEWNAVA

SEQ ID NO: 322 - protein, 257 aa, Zea mays
MDSNRSMATSGVAPFVAKTYRMVDDPATDGVVAWGRDNNSFVVADPFAFSQTLLPAHFKHSNFSSFVRQLNTYGFRKVDPDRWEFAHVSFLRGQTHLLGQIVRRSNGGKRKDDGNGAGSGSADDEDAVAMEVVRLRREQRAIEEQVAAMWRRVQETERRPKQMLAFLVKVAGDPQVLRRLVSGAGGDAVFAAAEPEDGASIKRARLLLDAGSGGDGAVDFSGLYSTTAGSEDDGVGFGSDYLQPPPPYVFPVNSGGY

SEQ ID NO: 323 - protein, 170 aa, Zea mays
MQEQAASSRPSSSERSSSSGHHVDMEVKEGMESDDEIRRVPELGLELPGASTSGREAGPGAAGADRALAQSSTAQASARRRVRSHADKEHKRLKRLLRNRVSAQQARERKKAYLTDLEVKVRDLEKKNSEMEERLSTLQNENQMLRQILKNTAVNRRGSGSTASGEGHGQ

SEQ ID NO: 324 - protein, 306 aa, Zea mays
MDQIATPDETAHASAPSVHKLFDAKLGHHSVMDGTLASTSQSSNIKTQLIRSSSLSRSISVNLEKRSPESDPESPQSHVSHPKFAEPMFSNSSTFCTSLFSSSSTTEPCRQMGTLPFLPHPPKCEQQVSAGHSSSSSLLLSGDTGLDVAEQSDDLNDLLNLSGDASDGSFHGENNALAFDEQMEFQFLSEQLEIAITDNEKNPHLDDIYGTPPQLSSLPVSSCSNQNLGSPVKVQLSSSQSSSSSATANKSRLRWTLELHERFVEAVKKLEGPEKATPKGVLKLMKVEGLTIYHVKSHLQKYRLAK

SEQ ID NO: 325 - protein, 340 aa, Zea mays
MCGGAILAELIPPTRRVASKPVTEGHLWSASSKKAGSGRDKRHQHEYADDDFEAAFEDFDDDFDVHEDDEDGHFVFSSKSALSPALHDGRAASQKKQRGRQFRGIRQRPWGKWAAEIRDPHKGTRVWLGTFSTAEDAARAYDVEARRLRGSKAKVNFPAASGRARGRARPRRGDDGNPRTAPETQHPAQPALLPRGERETQRKEGIAAVKPEATESFDVGGGLFFDMAFPTFPASPPPQAVDTSFAGSTATSETGSPAKRPRCDEDSSEGGSGSALELADELAFDPFVLLQMPYSGGYDDDSLDGLFAADEAVQQDVGNGMDGVRLWSFDEFPAVDGSVF

SEQ ID NO: 326 - protein, 93 aa, Zea mays
MASMSLSSSRAQWTAKQNKLFEQALAVYDRDTPDRWHNIARAVGGKSADEVRRYYELLVKDLEHIEAGKVAFPAYRCPGGYDDADSDRLKHLT

SEQ ID NO: 327 - protein, 381 aa, Zea mays
MEVCSPSDDVMEAQRRQREPTQAGGCSDDPRAVLTCLTFLEQKIAHLRGIISAAPRPPRQMVSAELSCIAVQLVSLSKSLAAAGGAADLDDGAARSPAPNDGGDSDSSDHDPFHADADADDDGRLPPAGSYEVIELGEEEILAPHVHSCKVCGKGFKRDANLRMHMRGHGEEYKTAAALAKPAAAAAATAQSSSSSSARCFYSCPFVGCKRNREAGAPQLPAAQDGRSYTCRRCNVKRFSVLADLRTHEKHCGRDRWVCSCGTSFSRKDKLFAHVAAFDGHAPALPPEDDAAAHNVANGGLGTDSYRRLTTMDTEAASLEFFSDTMLDALSCSDIEGFALMDGQGQCLDDDGRGSLSPWPVGLDSCDFDGFDLFGAPPIDF

SEQ ID NO: 328 - protein, 872 aa, Zea mays
MQCVRDELCRAGSEESVTCICMEEGGDPQLPSISVARTTSEGAGAVDLDLLEQLLSGDNGWLEVVSRSPNSVAFPPPSAFFSADATATTVTTTAAPAANASWLIQTGGASTPSVRERFSQALSYIRDTQSDGDVLVQLWVPVNRDDGKLVLTTSGQPFTLDHRSDSLIRFREVSTKYQFPADVRSGESPGLPGRVFIGRLPEWSPDIRCFTSYEYARVTDAKYLDVHGTMGLPVFEKRSYSCLGVIELIMTKQKLNFTSELNTICSALQAVNLRSTEVSSIPRKKFSTASYKDALPEILEVLRAACLTHKLPLAQTWVTCTQQGKRGSRHSDENYRYCISTIDEACFVNEAEMRGFHEACSEHHLLRGEGVAGKALTTNQPCFLPDIGSSTKLEYPLSHHAKIFRLKGAVAIRLRCTRTGIADFVLEFFLPTDCEALEEQKTVLDSLSGTMRSVCQTLRVVTDREMEGEAALEMNELNSFTPPEKDKDELSFGGNSADRRGASWTSLAGTSQQEPELAALRMHGTFSPVGQGPSLSGVQATAEGSKTKRRTKAEKTVSLQVLRQYFAGSLKDAARSLGVCPTTLKRICRQHGITRWPSRKIKKVDHSLRKLQQIIDSVHGAETAFQLNTLYKDLTDTSISSDNNLSGSVTVPPTNQSNLTDFNKHQPHKSSSNMPSTSHSHSSCSHGSQSSPSCSVGATEHAQQGIIDLMKSENPVKDSSIQTMQTENTSLYEHFSVHEAPIDLLQDVTEKANGAHHSSRSLSSPNPKQNTDANMRVKATFGSEKVRFRLNPECNFQGLKHELAKRLSIVDTNPLVLKYLDDDSEWVLMTCDADLQECLHVYKLADIQTIKISVHLAVSPATRVTAGHTGLS

SEQ ID NO: 329 - protein, 357 aa, Zea mays
MDKPVAPGIIKEELLEQQPPTQDGVGGGGDAPRPMEGLHEVGPPPFLTKTFDLVEDPATDAVLSWSRAGNSFIVWDPHVFADGLLPRLFKHSNFSSFVRQLNTYGFRKVDPDRWEFANEGFLRGQRHLLKMIKRRKPPSAVAPLRQQRAPASCLEVGEFGFEEEIDRLKRDKNILITEVVKLRQEQQSTKDHVRAMEERLRVAEQKQVQMMGFLARAMRNPEFFQQLAQQQDKRKELEDTISKKRRRPIDNTPFYSDGESEQLDSQLKMFESGVLNGLNEPELENLAVNIQELGKGSIDDGNLTQVSDQSELNDDFWAELLVEDFGDKAGQPELEGRTEDVNDLAQQLGYLSSSSPK

SEQ ID NO: 330 - protein, 428 aa, Zea mays
MTPSVTPWIPLAPTLLLVLCTGLAALWIHHCNFMDYNFDTSVLDEDVAGRGGREGSCPPAWARACDGCRAAPSVVYCHADTAYLCASCNSRVHAANRVASRHERVRVCEACECAPAVLACRADAAALCAACDAQVHSANPLAGRHQRVPVLPLPAAAVPAASVLAEAAATAAAVAGDKDEEVDSWLLLTKDPDDDDKNHNCSSNNNNISSNTSTFYADVDEYFDLVGYSSYCDNHINSNTKQYGMQEQQLLLHKEFGDKEGSEYVVPSQVGQQQSGYHRVIGTEQAASMTPGVSAYTDSISNSISFSSSMEVGIVPDNMATTDMPSSGILLTPAGAISLFSSGPPLQMPLHLASMDREARVLRYREKKKSRKFEKTIRYATRKTYAEARPRIKGRFAKRSSDMDVEVDQMFSAAALSSDGSYGTVPWF

SEQ ID NO: 331 - protein, 224 aa, Zea mays
MVRGKTELKRIENATSRQVTFSKRRNGLLKKAFELSVLCDAEVGLVVFSPRGKLYEFASAASLQKTIDRYRTYTRENVNNKTVQQDIQQVKADAVSLASRLEALEKTKRMFLGENLEECSIEELHNLEVKLAKSLHVIRGKKTQLLEQQISKLKEKERTLLQDNKELRDKQRNLQSPPEAPPDLNRCVPPWPRSLPAPSNDMDVETELYIGLPGRERSSNRDSD

SEQ ID NO: 332 - protein, 680 aa, Zea mays
MGIDLNAVGEDDPAGAVCAELWHACAGAGVALPRRGSAVVYLPQAHLAAGGCDGGGVSAPAPPRVPPHVVCRVVDVELRADAATDEVYARLALVAMDTMFGRNINDGETEEKNGEEEDGDGEKKHASHMFCKTLTASDTSTHGGFSVPRRAAEDCFPPLDYEQLRPSQELIAKDLHGMKWRFRHIYRGQPRRHLLTTGWSSFINKKKLVSGDAVLFLRGNDGELRLGVRRAVQLKNEALLEAVNCTDSKLLMLSAVANSLDNRSIFHICFNPRVGASEFIVPYCKFLKSLNYHFSVGTRFKVGCENEDANERSFGLIIGISEVDPIHWPGSKWKSLLIKWDGATKYSHQNRVSPWDIEGVGSSVSVTHRLSSSVSKRTKLCFPPSDLDTPILDGNGRPDSVETERFHRVLQGQELVHSSIHGTACSHSSDSPRCQGSYGRRFSADAWNCKMNDVMSGPRHLNATGFAYQPLGFSESVKFSEVLQGQEMSQAVPSFMRSAFNSGTQNGRVRPFDYVQRSDATQGYALQQFNLPATEVHSPSSVLMFNQTMVPHAELDGATNREEVHGSRYLSSNAIGREAEPWPSMQQQRASVNGSEPLDTTEASAPARNAESGSVGRGAGRSNCKLFGFSLTEKILGTDGGGVKEGNYEVDRQTPRVLDLFGHGSTPGALHALCAAPLGI

SEQ ID NO: 333 - protein, 258 aa, Zea mays
MEMGDSFEYYWEMQQYLESEELSLYMGTQDDALSCYDSSSPDGSISNSSWAPAGVAATASEKREGPGGAAAANKNILMERDRRRKLNEKLYALRSVVPNITKMDKASIIKDAIEYIEQLQAEERRALQALEAGEGARCGGHGHGEEARVVLQQPAAAPAPVEVLELRVSEVGDRVLVVNVTCSKGRDAMARVCRAVEELRLRVITASVTSVAGCLMHTIFVEVDSDQTNRIQIKHMIEAALAQLDDASASPPSVMSYY

SEQ ID NO: 334 - protein, 251 aa, Zea mays
MSCNGCRVLRKGCSDACVLRPSIDWIHGAQPQANATVFVAKFFGRAGLVASLAAVPLHHRPALFRSLLYEACGRTINPVSGAIGLMWTGNWDLCQAAADAVLRGESLRALSAVPAAFTDRDMDGLYGSVGGLVAAAAAAASPENSSSSAPSTTKRRNANGGSSNNAVPAAAASHHRPPPPAAAAAGLLLQSSCHQLDLCLTPALSPPGAGPRGCAAGASDEYSATTTCEDQTGDHGHGEPRPPPPLLNLFN

SEQ ID NO: 335 - protein, 87 aa, Zea mays
MSESRSSFRNVNTDCNWSKKENKLFEEALARYREGTPDRWLKVSRAMGGIKTADEVRRHYEILNEDVTLIVSGGIPFPNYNTQGAWN

SEQ ID NO: 336 - protein, 85 aa, Zea mays
MSASRSSSPNSISQWSQKENKMFEEALAYYGEGTSNRWDKVSRAMGGIKSAEEVRCHYEDLDYDVKMIESGHVPYPKYKTHGFWT

SEQ ID NO: 337 - protein, 96 aa, Zea mays
MASLSMTTSAAARAQWTPRQNKLFEQALAVYDKDTPDRWHNIACAVGGGKSADDVRRYYELLEEDVGHIESGKVPFPAYRYPAGYGAADRLKQLKI

SEQ ID NO: 338 - protein, 456 aa, Zea mays
MPPTTHHIYGYLLLGMEHVISMEEILGPFWELLPPPAPEPEPEREQPPVTGIVVGSVIDVAAAGHGHGGGDMMDQQHATEWTFERLLEEEALTTSTPPPVVVVPNSCCSGALNVDRPPVMEEAVMMAPAAVSSAVVGDPMEYNAILRRKLEEDLEAFKMWRAASSVVTSDQRSQGSNNHTGGSSIRNNPVQNKLMNGEDPINNNHAQTAGLGVRLATSSSSRDPSPSDEDMDGEVEILGFKMPTEERVRKRKESNRESARRSRYRKAAHLKELEDQVAQLKAENSCLLRRIAALNQKYNDANVDNRVLRADMETLRAKVKMGEDSLKRVIEMSSSVPSSMPISAPTPSSDAPVPPPPIRDSIVGYFSATAADDDASVGNGFLRLQAHQEPASMVVGGTLSATEMNRVAAATHCAGAMELIQTAMGSMPPTSASGSTPPPQDYELLGPNGAIHMDMY

SEQ ID NO: 339 - protein, 362 aa, Zea mays
MGLDVGEIGMGLDLGLDLRLFAARSAGGMAKGAAPAGIQSCIRSLEVERRKIEVFRRELPLCLRLLADVIDELKEEAAKRGEYDDGAATVDDGDKRKWMSTAQLWVDSDAKSDESDKEQQSEITSPPEPKLLGGGAPTPIRAAVSAVAVPQPLPPPLFRREDSSASSGLSLVSLSPATKAAVPISPPVVAASGTGTASARFCGTTMPPCGSEVNNMHSQAQQQQQASRKARRCWSPELHRRFVAALHELGGPQVATPKQIREVMQVDGLTNDEVKSHLQKYRLHNRRSSPGAAAAPVSQSIMLVDGVWAAQEQSSGSQSGSRQGPLQFSRAGMAVGGGDDSSSSDDDEDDDKSEDGYSLKCV

SEQ ID NO: 340 - protein, 323 aa, Zea mays
MKGDEKSAGGAPAYWGLGARPCDACGAEAARLYCRADAAFLCAGCDARAHGAGSRHARVWLCEVCEHAPAAVTCRADAAALCASCDADIHSANPLASRHERLPVAPFFGELADAPKPFASSAAVPKAADDDGSNEAEAASWLLPEPDHGQKEGATTEVFFADSDPYLDLDFARSMDDIKTIGVQGGPPELDLAGAKLFYSDDSMNHSVSSSEAAVVPDAVAGAAPEVAVVCRGLEREARLMRYREKRKSRRFDKTIRYASRKAYAETRPRIKGRFAKRTPGAGADGEEPLEEHEEIYSSAAAAVAALMAPGGADADYGVVPTH

SEQ ID NO: 341 - protein, 405 aa, Zea mays
MERVFSVEEIPNPYWVPPHPQSAAAGAVAAPAGEAAGLMNRCPSEWYFQKFLEEAVLDSPVPVAGASRGSVGAGVEAAESKTPGAAAPAAASSSVVDPVEYNAMLKQKLEKDLAAVALWRASGAAPPDHSPAGSSLPSVDVPHAGPLKPIGGTGSLVQNKLVGAPGGGSSPHVVQNADIPVKQTTSSSSREQSDDDDMEGDAETTGNGNPVQHRLQRRKQSNRESARRSRSRKAAHLNELEAQVSQLRVENSSLLRRLADVNQKFNEAAVDNRVLKADVETLRAKVKMAEDSVKRVTGMNTLFPAVSDMSSLSMPFNGSPSDSASDAAVPIQDDLNSYFANPSEIGGSNGYMPDIASSVQEDDDFVNGAQVAGKMGSTDSLQRVASLEHLQKRMCGGPASSGSTS

SEQ ID NO: 342 - protein, 222 aa, Zea mays
MDWAYYGSGYSTPASGGGGGDEDAYMTVSSAPPKRRAGRTKFKETRHPVYKGVRSRNPGRWVCEVREPHGRQRIWLGTFETAEMAARAHDVAALALRGRAACLNFADSPRRLRVPAQGAGHDEIRRAAVEAAELFRPQPGERNVGGSEAAAEAAAAAPCAMGSGDLGGGEFPYYPVDDGLEFEMRGYLDMAQGMLIDPPQPAAGQSAWIEDEYECEVSLWSY

SEQ ID NO: 343 - protein, 235 aa, Zea mays
MERGDCQFTVVPPRQYDEAQFMHQLMVAGDQQDPAGAGRGAAAAGGERKRRFTEEQVRSLETTFHARRAKLEPREKAELARELGLQPRQVAIWFQNKRARWRSKQLEHDYAALRAQFDAMHARVESLRQEKIALAAQVDELRGRLNERQDQSGSCEVNDAEAAADDKRNNSTSSLVQDDGATPPPAAVDASEDSAATGEYYDHVAYEYDGLHDPFVCATPDLWDTWPLLEWNAVA

SEQ ID NO: 344 - protein, 267 aa, Zea mays
MAAGGGGGSPAPFVWKTYTMVEDPGTAGVIGWGSGNNSFVVADPFVFSQTLLPAHFKHNNFSSFVRQLNTYGFRKVDPDRWEFAHASFLRGQTHLLRNIVRRGSSAAGAGGGKRKDASPTELASGDDMTMVATEVVRLKQEQRAIDDRVASMWRRVQETERRPKQMLAFLLKVVGDRDRLHRLVGDAPVPDNGFASGGAAEPPAAEVGEKRARLLLDGDSMVALGPEAVDFAGFYSGGGAFGDVAVDAAAGSRGGGFSFAFGVDAGY

SEQ ID NO: 345 - protein, 138 aa, Zea mays
MESDEEIRRVPEVGLELLTSPSTSGREATAAAAAAGTSSASQAASASRRGRSPADKEHRRLKRLLRNRVSAQQARERKKAYLSELEVRVKELEKRNSELEEKLSTLQNENQMLRQILKNTTVNNRRGPGSSSAGGDSQ

SEQ ID NO: 346 - protein, 438 aa, Zea mays
MNFLESIAVNGHRDRQHGGVMSRQSMVAVEQLTGPASARPAHTCAAQPHAHQLLSARYDHRGACASQVELPDRISPSNASTFCTSMYSSSSSSSAAADSSKSCRRAGALPFLPHPPKREQQQQQQSSSSPSLLVCTDLGNGGQDEAEAEHPAELKDFLNLSGEASWRGGFHGESSGVAFRFGEQVEFQFLSEQLGIAITDHDESPRLDDIYDRPPQTSSCPVLSCSDQEEGLQRAGSPVKAQPSSSRAASCNNKPRLRWTLELHELFVKAVNKLGGPEKATPKGVLRLMKVEGLTIYHVKSHLQKYRFAKYLPETKEDMKSSSEDKISKSEMPGSNAGRKKILRSLQVAEALRMQMEVQKQLHEQLEVQRQLQVRIEEHAKYLHKILEQQKARNSLSATTSSIETELSESTKEEKPETQADTSSAQLPNKKNSDTDME

SEQ ID NO: 347 - protein, 361 aa, Zea mays
MCGGAILAELREPAPRRLTERDIWQQKKKPKRGGAGGRRSFAAEDDEDFEADFEDFEADSGDSDLELGEGADDDVIEIKPFAAKSTFSRDGLSTMTTAGYDAPAARLAKRKRKNQYRGIRQRPWGKWAAEIRDPQKGVRVWLGTFNSPEEAARAYDAEARRIRGKKAKVNFPDAPAVGQKCRSSSASAKALKSCVEQKPIVKTDMNILANTNAPFYQSVNYASNNPFVPAMNSTVSFEDPIMNLHSDQGSNSLGCSDLGWENDTKTPDITSIAPIPTIAEGDESVFVNSNSNSSMVPPVLENNAVDLTDGLTDLESYMRFLMDGGASDSIDSLLNLDGSQDLGSNMDLWTFDDMPIAGDFF

SEQ ID NO: 348 - protein, 519 aa, Zea mays
MEGRMTSLEATMKVSSSMASSISRNADPDQQTLRPNSVEQFYFPRPGQSLPGIPPFFGPPSSSLYLPNDNEAKFGNQFESNPSQNTDWDPQAIVSNLTFLEQKIKQVKDIVQSMSNRENQLAGGSSELAAKQHLVTADLTSIIIQLISTAGSLLPSMKNPLLSSNPAVRQLGNTLGSPMGLGMNANQRPSVDSKTDIPDTGKTSDYDELMNSLNPAQDERDEMIKCPNPCGGEGSEPTPMEDHDVKESDDGGEGENLPPGSYVVLQLEKEEILAPHTHFCLICGKGFKRDANLRMHMRGHGDEYKTPAALAKPTKDSGADHAPVTRYSCPFVGCKRNKEHKKFQPLKTILCVKNHYKRSHCDKSYTCSRCNTKKFSVIADLKTHEKHCGRDKWLCSCGTTFSRKDKLFGHVALFQGHTPALPMEDVKVSEASEQPQDSEPMNEMARSNMYSFPCSSSDGISNLDMKMADDVRGYFSPLNFDPCFGALDDFTRPGFDISENPFSFLPSGSCSYGQQNGDS

SEQ ID NO: 349 - protein, 851 aa, Zea mays
MEEGGDPQLPSISAPRTTSEGAGGVDLDLLEQLLSGDNGWLEVVSRSPNSVAFPPLSAFFSADATATTVTTAAPAANASWWIQTGGASPSSVEERFSQALSYIRDTQSDGDVLVQLWVPVNRDDGKLVLTTSEQPFTLDHRSDSLLRFREVSTKYQFSADVKSGDSPGLPGRVFIGRLPEWSPDIRYFTSYEYPRVRDAQYLDVHGTMGLPVFEKGSYNCLGVIELIMTRQKINFTSELNTICSALQAVNLRSTEVSSIPRIKFSTASYKDALPEILEVLRAACLTHKLPLAQTWVTCAQQGKRGSRHSDENYRYCISTIDEACFVNEAEMRGFHEACSEHHLLRGEGVAGKAFTTNQPCFLPDIGSSTKLEYSLSHHAKIFKLKGAVAIRLRCTRTGTADFVLEFFLPTDCEALEEQKSVLDSLSGTMRSVCQTLRVVTDREMEDETVLEMNELNSFTPHGKDKVELSFGCNSADRRGEASWTSLAGTSQQESELAALRMHGMFSPGGQGPSLSGVQATAEGSKAKRRTKAEKTVSLQILRQYFAGSLKDAARSLGVCPTTLKRICRQHGITRWPSRKIKKVDHSLRKLQQIIDSVHGAETAFQLNTLYKDITNTSISSDNNLSGSVTVPPTNQSNLTDVNKHQPHKSSSNVPSTSHSHSSCSHSSESSPSCSGGATKHAQQGIIDQMKSENPVKDSSIQTLQTENTSLFEHFSVNETPIDLLQDVTEKANGGHHSSRSPSSPNPKQNTDANMRVKATFGSEKVRFRLNPECNFQELKHEIAKRLSIVDTNPLVLKYLDDDSEWVLMTCDADLQECLHVYKLAGIQTIKISVHLAVSPATRVTTGHTGLS

SEQ ID NO: 350 - protein, 384 aa, Zea mays
MDLMLPVTVKEEWPPEEEEEEDVDADADAPRPMEGLHEVGPPPFLTKTFDLVADPATDEVISWGRAGNSFVVWDPHVFAAVLLPRFFKHNNFSSFVRQLNTYGFRKIDPDSWEFANEGFLRGQRHLLRLIKRRRPAPPPPYLQASQSQGSCLEVGRFGGLDGEMERLRRDKSILLAEVVKLRQEQQSTRAGMRAMEERLRHAEHKQVQMMGFLARAVQSPDLFQLLAQQQARRRELEGAALLSAASRKRRRPIGAAPANGGLQQQEEEQQQGDDDDPTATRALFAELDERGTTSELENLALNIQGLGKRRQDGSEKQGGRARSQQQGGFETAELTDDFWEELLNEGMKGGAEAETLPPERRRPAWYVDALAQKLSSMSNNTTAK

SEQ ID NO: 351 - protein, 232 aa, Zea mays
MVRGKTQMKRIENPTSRQVTFSKRRNGLLKKAFELSVLCDAEVALVVFSPRGKLYEFASGSAQKTIERYRTYTKDNVSNKTVQQDIERVKADADGLSKRLEALEAYKRKLLGERLEDCSIEELHSLEVKLEKSLHCIRGRKTELLEEQVRKLKQKEMSLRKSNEDLREKCKKQPPVPMASAPPRAPAVDNVEDGHREPKDDGMDVETELYIGLPGRDYRSSKDKAAVAVRSG

SEQ ID NO: 352 - protein, 688 aa, Zea mays
MGIDLNMADGESQERRPPPAVCRELWHACAGPVVALPRRGSLVVYLPQGHLAAAGGGNVAVDLPPHVACRVADVELCADAATDEVYARLALVAEGEAFGRNLRGGGVDGDDDMEDFDVERKSRMLHMFCKTLTASDTSTHGGFSVPRRAAEDCFPPLDYNQLRPSQELVAKDLHGAKWKFRHIYRGQPRRHLLTTGWSSFVNKKKLVSGDAVLFLRGDDGELRLGVRRAIQLKNEALFDDFSCDSTKRHTLLAVADSLKHKSVFHISYNPRATASEYIIPHHKFLKSLNLPFCIGARINLQCHNEDVSERRSGMVVHVSEIDPMKWPGSKWRSLLVRWEDGVECNGQDRVSPWEIEIAGGSVSVAHSVSASSSKRTKLCPQGNLDVPTMYVTGNGNGCTDSVETGKFPRVLQGQDLMSFRTRHVPSAPQTVEAAKLQSSGASRFLSNARGCALGGPTSRLAVHNSDFTYQSVGFNESIGFSEVLQGQEISRAVPMFQGMMSEACSLKGGYGLHSYMRTPVAVTGLSATTQECSLTLSTPPGAQVPSVYPDNIFNRTVVRQLGLASKFDGGATNAQQSVPFDRPREIWSKPQHEISDQTKMDHFETRRASAPGDDAAKHGSGGEVVRKTSCRLFGFSLTEKILPADDDGIKEVTYEPECQNPRMLDLFGYNCSAPSAALPALCAAPFGM

SEQ ID NO: 353 - protein, 329 aa, Zea mays
MDKYWEETQRYLEYEELRYEYELRTNEPPSPRAADTMRAPTEHSFIYPFLRRWWLQHLLGGAGGRHVLLRLQLAGRLHLPLVVVGGGVRQQEHPDGARPPPQAQRQALRAPQRRAEHHQGKRRSRTHAATDRRSSVPSSSVLSALYYIACMQMDKASIIKDAIEYIQQLQVEERRVLQELRVLDDDTAAAATAQVECCDVDGGLLRREAERAKKMKRAQSVASGAQSAPPPPPPPHVEVLELRVSEVGDHVLVVSVTCRKRRDAMARVCRAIEDLRLRVITANVTSVAGCHVHTVFVEVRRRWHGIWHHMGSGYSVFFSPFFILDDGYD

SEQ ID NO: 354 - protein, 329 aa, Zea mays
MSCNGCRVLRKGCSEACVLRPCLQWIDAAEAQGHATVFVAKFFGRAGLLSFISAVPDAQRPAYYCLPGLLWSMAPPRSPVPVAAVRGGGADHQPGARRGGAAGHGELAPLPGRRRHRAAGRRHRPAAGAWRRDGPPVRAPRRHRQARRRLVHLLHGEAGAEGRRRCRGAARGGGGGVLRPRAVPQQQPRVPAGDGGREEGPPPAARHAVHELGRVRHDHGRRRQGARAAQPFCLMKPPVDDAGQTKPNHTRSGSLDWPPCDVMFCLDDLSRRPGVFSRRRRRQGRFSFVSGCGLRFYFWLRSSGSRKETTSSSRSRPRSPVCVWAKMRL

SEQ ID NO: 355 - protein, 97 aa, Zea mays
MSSWTYCENALFERALATYDRDTPRRWELVAAAVGGGKTAEDARRHYAHLVLDVGDIESGGYDNPNPRGPAPTNSGGASISGNGNNRGGGRANRPQT

SEQ ID NO: 356 - protein, 405 aa, Zea mays
MERVFSVEEIPNPYWVPPHPQSAAAGAVAAPAGEAAGLMNRCPSEWYFQKFLEEAVLDSPVPVAGVSRGSVGAGVEAAERKTPGTAAAAAASSSVVDPVEYNAMLKQKLEKDLAAVALWRASGAAPPDNSPAGSSLPSVDVPHAGPLKPMGGTGSLVQNKLAGAPGGGSSPHVVQNADIPVKQTTSSSSREQSDDDDMEGDAETTGNGNPVQQRLQRRKQSNRESARRSRSRKAAHLNELEAQVAQLRVENSSLLRRLADVNQKFNEAAVDNRVLKADVETLRAKVKMAEDSVKRVTGMNTLFPAVSDMSSLSMPFNGSPSDSASDAAVPIQDDLNSYFANPSEIGGSNGYMPDIASSAQEDDDFVNGAQVAGKMGSTDSLQRVASLEHLQKRMCGGPASSGSTS

SEQ ID NO: 357 - protein, 345 aa, Zea mays
MGLDVVEIGMGADLSLDLRHFASKAVRQSKDYAPAPAPDMDACIRRLEEERGKIEMFKRELPLCARLLADVIDVMKEEAGKAVAEEDGAAGDKSKWMSTAQLWTGDCGREDAEPEKQDKERSSPEARSRAAGGAFLPLKAAVGSGAPAFAPLGLRMDDKAAARAGMPDLCLLSPPATKSAAEESRRQVVGFAQAATRAAAATAPAAPSLSVGVQSPSQQARKARRCWSTELHRQFVAALNQLGGPQVATPKQIRELMKVDGLTNDEVKSHLQKYRLHNRRAPGSGVVSQPIVLVGGLWIPQEQSSSQSGSPHGPLHFSTSGIAVSSAATVSCEEEDGRSESYGWK

SEQ ID NO: 358 - protein, 320 aa, Zea mays
MEGDEKSAGGAPAYWGLGARPCDACGAEAARLYCRADAAFLCAGCDARAHGAGSRHARVWLCEVCEHAPAAVTCRADAAALCASCDADIHSANPLARRHERLHVAPFFGALADAPKPFASAAPPKATDDDGSNEDEAASWLLPEPDHGQKEGATTEVFFADSDPYLDLDFARSMDEIKTIGVQQSGSPELDLAGTKLFYSDHSVNHSVSSSEAAVVPDAASGMAPMVAVVSRGLEREARLMRYREKRKSRRFEKTIRYASRKAYAETRPRIKGRFAKRTPGAGEDTLEEHEEMYSSAAAAVAALMAPGGADADYGVVPTY

SEQ ID NO: 359 - protein, 255 aa, Zea mays
MLRLVPPPARHAHGHYHSHTQAAAMDAAGSFSDYSSGTPSPVAGGGGGDDFGSSSYMTVSSAPPKRRAGRTKFKETRHPVYKGVRRRNPGRWVCEVREPHGKQRIWLGTFETAEMAARAHDVAALALRGRAACLNFADSPRLLRVPPTGSGHDEIRRAAAVAADQFRPAPDQGNVAAEEEAADTPPPDALPSVTMQSVDDDPYCIIDDRLDFGMQGYLDMAQGMLIDPPPMAGSSTSGGGGDDDDDDGEVKLWSY

SEQ ID NO: 360 - protein, 164 aa, Zea mays
MDRPGHHQHHFFMPPPPQQQQQQLCVPMMDDPSSFLAELMGVGGGGGGGPSSSARGERKRRFTEEQIRSLESTFRARHGHAKLEPREKAELARELGLQPRQVAIWFQNKRARWRSKQLEHDYAVLRAKFDDLHARVESLRRDKLALSTQVASDPRYSVRSDDVL

SEQ ID NO: 361 - protein, 348 aa, Zea mays
MMDGLHTDLALGLLGCGGVGVGSSGRGEQLQTAPFVAKTYQMVCDPRTDALVRWGSENNSFVVVDPAGFSRLLLPCFFKHRNFSSFVRQLNTYGFRKVHPDRWEFAHESFLRGQTHLLPRIVRRKKRGEGACTSSGGDAQAQYAAAAAGCCISMGGEDHRTEGEAEAAVLEEVQRLRQEQTAIGEELAQMSRRLQATERRPDQLMSFLARLAEDPDGVTRHLVEQAAEKKRRRMMQLASQPVRRLPPPPPPPPVLHHPLLALGGAAAAAAKGLDGGCQWAEQKKPSVVLTAAFDHPAASYCGAQHAVPNLGGGNGGGGINGMGLTADETAVETTTTPFPFCLLGQGFF

SEQ ID NO: 362 - protein, 193 aa, Zea mays
MAAQEQEHEKQQAKTSTTSSLPSSSERSSSSAPNNLREGAEAAGAGVESDEEIRRVPELGGASASASASSGAGKEDGARAVAAGAQGHPPAAGKKRGRAPGDKEQNRLKRLLRNRVSAQQARERKKAYLTELEARAKDLELRNAELEQRVSTLQNENNTLRQILKNTTAHASKRSGGGGKGGDGGKKHHFAKS

SEQ ID NO: 363 - protein, 312 aa, Zea mays
MYSPKPESSFGPNPNSGTHQQQMELTGANMGPGNGANNNTNMAGRQRLRWTNELHERFVEAVTQLGGPDRATPKGVLRIMGVQGLTIYHVKSHLQKYRLAKYIPDASTDGNKTDNKDPGDLLAGLEGSSGLQISEALKLQMEVQKRLHEQLEVQRQLQLRIEAQGKYLQKIIEEQQRLTGVKSETPAGGASVTVSSDQFPDSERTEPSTPAPASESPTQVGASNRDTGDRTEATKSTCHGDSLSRNEPLTPDSNCQNGSPVASPNHERAAKRQRGSGTEFLDSEAEFSLPRHIFESSSGSEFQQYSMSYSGQ

SEQ ID NO: 364 - protein, 363 aa, Zea mays
MCGGAILSDIIPPPPPRRVTAGHLWPESKKPRRAASGRRGAPVEQHEQEEDFEADFEEFEVESGESELESEDEPKPFAAPRSALARGGLNTGAAGVDGPAANSVKRKRKNQFRGIRRRPWGKWAAEIRDPRKGVRVWLGTFNSPEEAARAYDAEARRIRGKKAKVNFPDEVPTAVSQKRRAAGPASLKAPKMDVEEEKPIIKLAVNNMTNSNAYHYPAVVGHNIIPEPFMQTQNMPFAPLVNYAALVNLSSDQGSNSFGCSDFSLENDSRTPDITSVPAPVATLAAVGESVFVQNTAGHAVASPATGNTGVDLAELEPYMNFLMDGGSDDSISTLLSCDGSQDVVSNMDLWSFEDMPMSAGFY

SEQ ID NO: 365 - protein, 518 aa, Zea mays
MEGGMSSLEAAMKASSSMASSMARNADPNQQTLRPNLVEQFYFPRPGQSLPGIPPFFGPPSSLYLPNDNEAKFGNNFESNPSQNTDWNPQAIVSNLTFLEQKIKQVKDIVQSMSNRENQVAGGSCEVAAKQQLITADLTSIIIQLISTAGSLLPSMKNPLLSSNPAVRQLGNTLGSPTGFGMNANQRPSVDSKTDIPDTGKTSDYEELMNTLNTSQAERDELIKCPNPCGGEGSELTPMEDHDVKESDDGGEGENLPPGSYVILQLEKEEILAPHTHFCLICGKGFKRDANLRMHMRGHGDEYKTPAALAKPTKDYGADHAPVTRYSCPFVGCKRNKEHRKFQPLKTILCVKNHYKRSHCDKSYTCSRCNTKKFSVIADLKTHEKHCGRDKWLCSCGTTFSRKDKLFGHVALFQGHTPALPVEDGDVPEGSEQPQDGEPTNEMARSMVYSFPCSSSDGLLNLDMKMADDVRGYLSPLSFDNCFGAFDDFTRPGFDISENPFSFPPSGSCSYGQQNGDS

SEQ ID NO: 366 - protein, 535 aa, Zea mays
MEEGGDPQLPSISARTTSEGAGGVDLDLLEQLLSDDNGWLETGGASPSSVEEQFSQALSYIRDTQSDGDVLVQLWVPVNHDDGKLVLTTSEQPFTLDHRSDSLLRFREVSTKYQFSANVKSGDSPGLSGRVFIGRLPEWSPDIRYFTSYEYPRVRDAQYLDVHGTMGLPVFEKGSYNCLGVIELIMIRQKINFTSELNTICSALQFSTASYKDALPEILEVLRAACLTHKLPLAQTWVTCAQQGKRGNRHSDENYRYCISTIDEACFVNEAEMRGFHETCSEHHLLRGEGLKGAVAIRLRCTRTGTTDFVLEFFLPTDCEALEDQNIVLDSLSGTMRSVCQTLRVVTNREMEDEAVLEMNELNSFTPHGKDKVELSFGGNSADRRGEASWTSLAGTSQQESELAALRMHGMFSPGGQGPSLSGVQATAEGSKAKRRTKAEKTVSLQILRQYFAGSLKDAARSLGGDNSRSAGIMSLSRLCVYGSSSITYVLSARGTSGELVLFVRRPEMVLDYGGIQPLLFNSLSSLTKWMKMEI

SEQ ID NO: 367 - protein, 375 aa, Zea mays
MDSTLNQVKEESHGEGGDLMAGTVEAADGPSAAVAAAPKPMEGLHDPGPPPFLTKTYDMVDDSDTDLIVSWSATNNSFVVWDPHAFATVLLPRHFKHNNFSSFVRQLNTYGFRKVDPDRWEFANEGFLRGQRHLLKNIRRRKPPAQNATNQQSIGPYLEVGHFGYDAEIDMLKRDKQLLMAEVVKLRQEQQNTKANLKAMEDRLQGTEQKQQQMMAFLARVMRNPEFLKHLVSQNEMRKELQDAISKKRRRRIDQGPEADDLGASSSLEQGSPVLFNAQDPVEFLVDGIPADLESPAFDGHGLIGPHDIDIDIDIGSTSEQQQDMPQEDLNDNFWEQLLNEGLGEENDSPVIEDDMNVLSEKMGYLNSDGPTSSN

SEQ ID NO: 368 - protein, 228 aa, Zea mays
MVRGKTQMKRIENPASRQVTFSKRRNGLLKKAFELSVLCDAEVALVVFSPRGKLYEFASGSAQKTIERYRTYTKDNVSNKTAHQDIEQVKADAEGLAKKLEALEAYKRKLLGERLEECSFEELHSLEVKLEKSLHCIRGRKTQLLEEQLHKLKEKEMNLRKSNEDLREKCKKQPPPPPPMLMAPPPPPAPAAIDHTGPKDVGMDVETELYIGLPGRDYRSNNKDMTAQ

SEQ ID NO: 369 - protein, 683 aa, Zea mays
MGIDLNMVDGEGHERRPPPVTCRELWHACAGPVVALPRRGSLVVYLPQGHLAAAGGGDVAADLPPHVVCRVADVELCADAATDEVCARLALVAEGEAFGRNLGGGGVEGDDGMEDFDAERKSGMLHMFCKTLTASDTSTHGGFSVPRRAAEDCFPPLDYNQLRPSQELVAKDLHGAKWKFRHIYRGQPRRHLLTTGWSSFVNKKKLVSGDAVLFLRGDDGELRLGVRRAIQLKNEALFEDFNSDSTKRHSLTAVADSLKNRSVFHISYNPRATASEYIIPYAKFLKSLNHPVCIGARINFQCHNEDVSERRSGVVVRISEIDPMKWPGSKWRSLLVRWEDGAECNGQDRVSPWEIEIAGGSVSVSHSLSASSSKRTKLCPQGNLDVPAMWNGCTDSMETGKLPRVLQGQELMSFRTCHVPCAPQTAEAAKLQSSDASRFLSNAHGCALGGPTSRLAVHSSGFTYQCVGFNESIGFSEVLQGQEISRAVPKFQGMMSEACSLKDRYGLHSYMRAPVAVNGLSATTQECSLALSTPPGAQVPSLYPGNVVNRTVVPQLGLARKFGGGGTNGQQSGPFDRPRELWTRPQHETPDQMNLDQFETRRPSVPVDAAKLGSGGGEVRKTSCRLFGFSLTEKILPADDDDVKEVSYETECQNPRMLDLFGYNCSTPSAALPALCAAAPFGM

SEQ ID NO: 370 - protein, 382 aa, Zea mays
MEADSMVAMGCGGFYWQSPPRFLLEPLDLADIVDSSMYVPTNEADEPVSGLCSSNRPAEDYSSSAEGANSCSAAVVPSPPPPPGVTTTTTRNMDMERTRRRKLNERLYALRSVVPNITKMDKASIVRDAIAHIEHLQEQERRLLAEISVLQSSDDGTAAAAAVKTEDAAATGGAAYDVDSVPWRKKPRAVPLPSVYFTDNPTSSISSSPPVRILEVQVSQAGERVAVVSLWCSRGRDAVGKICLALEPLRLRVVTATITARGDTVFHTLFVEVIKQPANYSLPHDGNYCGCPCTCACLPEKSASALANRWRHRGDVARDDVRNGAPLWLSSSSFRQKLGAGVDVGLEVSSVLADRRLVKYVKFLRGKRARDILYFVLLTVKD

SEQ ID NO: 371 - protein, 212 aa, Zea mays
MSCNGCRMLRKGCSDACVLRPSLQWIDGGAEAQGHATAFVAKFFGRAGLMSLLTAVPEPQRPAVFQSLLYEAAGRTIDPVSGAVGLLGAGSWHLCQAAVETVLRGGAIAPLPESDSDGARRGASAVAARRAVGCSTFSTAKRAPASVGAPPEPSCDLGLWLSPGSPPATGERRRRRRPGTPSMTSEESVTTMSGGGGGGGGGREPELLNLFV

SEQ ID NO: 372 - protein, 142 aa, Zea mays
MSSASNSAKGSSPSSSTSSQWTKPQNKLFERALAVYDTDTPDRWHNVARYMGGTTSVEEVRRRYQQLAVDVAQIESGEVPFHYWYAAAPPLHPATLVMSMCDLSTIYMVFRSMSYSKVAVLITITKDQPSKSSRKKSQPWVF

SEQ ID NO: 373 - protein, 373 aa, Zea mays
MGLDVMEIGMGADLSLDLRHFASKAVRQSKDDTPAPDMDACIRRLEEERGKIEMFKRDLPLCARLLADVSTGSVGVLSGARFVGGPKSFGALRSQKQDKGRCSPEARSRGALLPFKADVGSGAPAFAPLFLRTDDKAAAARVGVPDLSSLLSPPATMPPADAGAEESRRQKETLSSFMLRHACSCHAEANQGADEGGWADKRRSEKPSSEIPAAQPQGAWIRRGAPADRARGRAVDSPGARQPSVWISPRPPPPPVHLGGRRLVRRHRQLRGGRRPAEERRQCTATETKTFGIVLGWMDGRTNEAGPRALNIRRRRCIGGLPVALDGEGGTGVRNRTTQCSGQKNRNRNIIFRLINTMREEWRGYEDILVDSA

SEQ ID NO: 374 - protein, 364 aa, Zea mays
MELHKYWGVGGRRCGSCEGAPAAVHCRTCVGGSFLCTTCDARPAHARLGHERVWMCEVCELAPAAVTCKADAAVLCAACDSDIHDANPLARRHARVPVAPIGSEAAAAAVEAMLFGTGEAAASEADEQHAAAEHAHAHAHALNLNVEAKDMKLDYLFSELDPYLSVEIPRFQHADSVVPNGAGAAVELDFTCGIGVKHSSYSSYTATSLAHSGSSSEVGVVPEAFGGSGSGGGSFELDFTRPKPQAYMPYTGTPQSHSVPSADVEVVPERGDLAAVRPVPLMGESREARLMRYREKRKNRRFEKTIRYASRKAYAETRPRIKGRFAKRADHDGDADADDAEAEAEAAVPMSYVLDFGYGVVPSF

SEQ ID NO: 375 - protein, 238 aa, Zea mays
MCPTKKEMSAESSGSASSWTSASASASTSTSPEHQTVWTSPPKRPAGRTKFRETRHPVFRGVRRRGSAGRWVCEVRVPGRRGCRLWLGTFDAAEAAARAHDAAMLAIAGASACLNFADSAWLLAVPASYASLADVRRAVAEAVEDFQRREAAAGDDARSATSPTPSTSGTDDDAATDGEESSPATEVSSFQLDVFDNMSWDLYYASMAQGMLMELPSAVPAFGDDGYTNVADVPLWSY

SEQ ID NO: 376 - protein, 239 aa, Zea mays
MEGDDDGPEWMMEVGGAGATGKGKGGALDKNKKRFSEEQIKSLESMFATQTKLEPRQKLQLARELGLQPRQVAIWFQNKRARWKSKQLERDYSALRDDYDALLCSYESLKKEKHTLLKQLEKLAEMLHEPRGKYSGNADAAGAGDDVRSGVGGMKDEFADAGAAPYSSEGGGGGKFAHFTDDDVGALFRPSSPQPSAAGFTSSGPPEHQPFQFHSGCWPSSTEQTCSSSQWWEFESLSE

SEQ ID NO: 377 - protein, 331 aa, Zea mays
MDGLHTELALGLLECGVVGSGGETAPFVAKTYQMVCDSRTDALVRWGRGNNSFVVADPAGFSRLLLPCFFKHSNFSSFVRQLNTYGFRKVHPDRWEFAHESFLRGQTHLLPRIVRRKKRGGGGGACSSGGDAPQAGCCISTMGEDHRPEADPDEKQEADAEAALLEEVQRLRQEQTAIGEELAQMSRRLQATERRPDQLMSFLDRLAEDPDGVTRNLVEQAAEKKRRRMQLASQSQPARPPLPPAPPPPVLHPLLALGGAAAKGLDGWQWAELQKPSVVLPAFDFDPAASCCGAQHAPNLGGAGIIGMGLTADETTVETPFPFCLLGQGFF

SEQ ID NO: 378 - protein, 196 aa, Zea mays
MAAQEQEQEQEKQQAKTSTTSSLPSSSERSSSSARNNLTEGGAESDEEIRRVPEMGGASASASSGAGADERPKGEDGKQGQVAAGAQPPAGGKKRGRTAGDKEQNRLKRLLRNRVSAQQARERKKAYLTELEAKAKGLELRNAELEQRVSTLQNENNTLRQILKNTTAHASKRSGGGGGGGGKGGDGGKKHHLAKS

SEQ ID NO: 379 - protein, 257 aa, Zea mays
MMYHAKNFSVPFAPQRAQDNEHASNIGGIGGPNISNPANPVGSGKQRLRWTSDLHNRFVDAIAQLGGPDRATPKGVLTVMGVPGITIYHVKSHLQKYRLAKYIPDSPAEGSKDEKKDSSDSLSNTDSAPGLQINEALKMQMEVQKRLHEQLEVQRQLQLRIEAQGRYLQMIIEEQQKLGGSIKASEDQKLSDSPPSLDDYPESMQPSPKKPRIDALSPDSERDTTQPEFESHLIGPWDHGIAFPVEEFKAGPAMSKS

SEQ ID NO: 380 - protein, 418 aa, Zea mays
MCGGAILSGFIPPSGVAAAAAAAKKQQQQQQRCRVTADLLWPGPGSKGAPQDKEEDFEADFREFERGLGEDDVDSAGEGGDPEVQELPPPEPTRFAFATAAKAAVDGVMTPPPKDVQGDRAVKKRGRKNQYRGIRQRPWGKWAAEIRDPNKGVRVWLGTYNTAEEAARAYDAEARKIRGKKAKVNFPDDATGTRHRPTTDEIFNNLKNDDNNNNDDLFAMFAFGDNKKKVPAAKPAAAEGGSGSGSFLVPAPAVAVVPGNKRRSSATNTMLSVSDDQRSNSYGSGSSDLVGSWSWDDDAAAAAMTSDYTSSVFAPDNAVLPAASYTQGGAPKRMRSSYGGAPPSLAHDAAMPGFGLDKVSYHHYQALPPYYVGSSNASVGNLGLLQQADDAPAPQDGASAGDIWSLDELLMLAAAGAY

SEQ ID NO: 381 - protein, 467 aa, Zea mays
MDNHIHSQPAANLYYQFGMGTEQQYPPPFASPPSTNIPHMDWNPATMLDNLTFIEEKIQQVKDVIRTMVDNAGQVQVQCHHQAGELLAQKQKQQVVNADLTCLIVQLISTAGSLLPSLKNSSFLSHPHPAGHVDMANHVGPSSSLVPNAMTVSEDYEELFKGWTDGGIEVDDDGVLVEEQEITKDGDSLSYELLQLEEDEILAPHTHFCTICGKGFKRDANLRMHMRGHGDEYKSPAALAKPPRDPGAEQEPAKRRYSCPFAGCKRNKLHKSFQPLKTILCVKNHYRRSHCEKSHTCGRCHAKKFSIVADLRTHEKHCGRRDRWVCSCGTSFSRKDKLFAHVALFQGHTPALSSPLEEEPPKACSDQHQTGRAGSRREPAKVPAGSVGGGSGSSFVWGASSSGENSALDIKGFVDGCSGDFLSTANFGSFNLSFGPADGFTGEPSSGGSFSMLPPEHFQSAQKKGQN

SEQ ID NO: 382 - protein, 304 aa, Zea mays
MEAGMDVWLDSCVAQLGPREQPFTLDHRSDSLLRFREVSTKYQFSADVKSADSPGLPGRVFIGRLPEWSPDIRYFTSYEYPRVRDAQYLDVHGTMGLPVFEKGSYNCLGVIELIMTRQKINFTSKLNTICSALQFSTASYKDALPEILEVLRAACLTHKLPLAQTWVTCDQQGKRGSRHSDENYRYCISTIDEACFVNEAEMRGFHEACSEHHLLRGEGVAGKAFTTNQPCFLPDIGSSTKLEYPLSHHAKIFKLKGAVAILLWCTRTGTSDFVLEFFLPTDCEALEEQKTVLDSLSGTMRSVC

SEQ ID NO: 383 - protein, 359 aa, Zea mays
MSHGNGMLNSVKVERWPAAVAANGQPRPMDVLHDGSSPPFLTKTYDMVDDPTTNAVVSWSAANNSFVVWDPHIFGTVLLPRYFKHNNFSSFVRQLNTYGFRKVDPDRWEFANEEFLRGQRHLLKNIRRRKPPHSSPNQQSLGSYLEVGHFGYEEEIDQLKRDKQLLMAEVVKLRQEHQNTRSDLQAMEEKLQDTEQKQQQMMAFMARVMQNPDFMRQLISQREMRKELEDAISKKRRRRIDQGHEAGSMGTGSSLEQGPQGVFEPQEPVESLANGVPSDLESSSVEAKGLEVRQGVSSGGSEHLNGRPSGELNDDFWEDLLHEGGLGADAGNAVGQDDMNMDMDPDVSLPQLKQHGPRH

SEQ ID NO: 384 - protein, 240 aa, Zea mays
MGRGKVELKRIENKISRQVTFAKRRNGLLKKAYELSLLCDAEVALIIFSGRGRLFEFSSSSCMYKTLERYRSSNYSTQEVKAPLESEINYQDYLKLRTRVDFLQTTQRNILGEDLGPLSMKELEQLENQIEVSLKHIRSRKNQMLLDQLFDLKSKEQELQDLNKDLRKKLQETSPQNVIHDVSWEEGGHSGSSVLGPFQGLLQHHGNDPSLQTRYHQQAYMDQLNEDMADPDEHGRSGWI

SEQ ID NO: 385 - protein, 736 aa, Zea mays
MAGIDLNDTVEEDEEEAEPGNACSQQSRTSSAATFPPPPPNQPRPSAAVCLELWHACAGPVAPLPRKGSVVVYLPQGHIEHLGDAAAAGGGAPPPVALPPHVFCRVVDVTLHADASTDEVYAQLALVAENEDVARRLRGRSEDGSAEDGDEGETVKQRFSRMPHMFCKTLTASDTSTHGGFSVPRRAAEDCFPPLDYSQQRPSQELVAKDLHGTEWRFRHIYRGQPRRHLLTTGWSAFVNKKKLVSGDAVLFLRGDNGELRLGVRRAAQLKNGSAFPALYNQCLNLGSLPNVAHAVATKSVFHIYYNPRLSQSEFIIPFSKFIKSFSQPFSAGSRFKVKYESDDASERRCTGIIAGIGDADPMWRGSKWKCLMVRWDDDVDFRQPNRISPWEIELTSSVSGSHMSAPNAKRLKPCLPHVNPDYLVPNGSGRPDFAESAQFHKVLQGQELLGYRTHDNAAVATSQPCEATNMQYIDERSCSNDASNIIPGVPRIGVRTPLGSPRFSYRCSGFGESPRFQKVLQGQEVFHPYRGTLVDASLSNSGFHQQDGSHVPTQASKWHAQLHGCAFRGQQAPAVPSQSSSPPSVLMFQRGDPKMSPFEFGHFHVNKKEDRRAMFVHAGGIGGTEQTTMLQAHHVSGGTGNRDVTVEKSHPAVAAASDNREVSKNSCKIFGISLTEKVPAMKEKGCGDINTNYPSPFLSLKQQVPKSLGNSCATVHEQRPVVARVIDVSTVDMMI

SEQ ID NO: 386 - protein, 611 aa, Zea mays
MVMKMEHEDNGAIGGTDGTWTEDDRALGAAVLGADAFAYLTKGGGAISEGLVATSLPGDLQNKLQELVESESPGTSWNYAIFWQLSRTKSGDLVLGWGDGCCREPRDGELGAAASAGSEDSKQRMRKRALQRLHIAFGVADEEDYSPGIDQVTDTEMFFLASMYFAFPRHAGGPGQAFAAGIPIWVPNSERKVVPANYCYRGFLANAAGFRTIVLVPFESGVLELGSTQHIAESSGTVQTVRSVFAGTSGNKSAVQRHEAERSPGLAKIFGKDLNLGRPSVGLAVGVSNSKVDERTWEQRSAVGGTSLLPSVQKGLQNFSWSQARGLNSHQQKFGNGVLIVSNNEGAHRNNGAVDSPSAAQFQLQKAPQLQKLSVVQKTPQLVNQQPMQAQVPRQIDFSAGSSSKPGVLVTRAGVLDGESAEVDGLCKEEGPPPVMEDRRPRKRGRKPANGREEPLNHVEAERQRREKLNQRFYALRAVVPNISKMDKASLLGDAITYITDLQKKLKEMETERERLLESGMVDPRERAPRPEVDIQVVQDEVLVRVMSPMENHPVKKVFQAFEEAEVRVGESKVTSNNNGTAVHSFIIKCPGTEQQTREKVIAAMSRAMSS

SEQ ID NO: 387 - protein, 313 aa, Zea mays
MRMSCNGCRVLRKGCGDACTIRPCLQWIEAPEAQANATVFLAKFYGRAGLLNLLAAAPDDGVRPAVFRSLLYEACGRIVNPVYGSVGLLWSRQWHRCADAVEAVLRGDPVVQVDAGSDAAAAPPLLAGARPPPPAAFDIRHVPRDPDATAADLLRAGRKRFKRAGSSSNASKAKPLPLELEGKAGNNERASPSPPPTQQREAEELQPVPMVVEPEHGEESAGSHDHHLQLQGWSEEDTDVEAASHVSQAEAEPPASSQSQVLVADQEEEEVGLELTLGFEPVVRQQPRSSRCDKSGLSAASSLIGLRLQLPAA

SEQ ID NO: 388 - protein, 515 aa, Zea mays
MGIQGNKAATHEHDFLSLYAAAAAKDAPLLLHDSKAPPPSQGNFLLKTHDFLQPLDQKPGAPPEPSPLPASAAESRHQPQQQVVVANQHALPLPGGVGTFSISPAPVSVALPAAVVKSEPPFVLWGQPAATLHPGARAGHQQQWALPFAGAGQVRLPPQQAPPDRKGRGGAGGGVMESGSRSSGGAGFDDDDGLTTRREVSSSLQDLTVRVDRKGGSCSDGGTDQRPNTPRSKHSATEQRRRSKINDRFQILRELLPHSDQKRDKATFLLEVIEYIRFLQEKVQKYEATFPEWNQENAKMLPWSNMYFRSFWKNAQSKGQISGDSPPDPSHFMRNGSSPGSNFTGKLDDNHNIVTSAAASGAQDQVETDHMASGCYRSAETTANFTNNAMSQSQPQWTGPSPVDDSAVNSETLNNQQLVIDEGTIRVSSNYSQELLNSLTHALQSSGVDLSQANISVQINMGKRAAKRPAAGVSSNSKEPADPASSNELGHQLTLSGAGADCLSHATKRHKRSNS

SEQ ID NO: 389 - protein, 259 aa, Zea mays
MAEQQPPHSPYPAVQVQRPGPPAGHSRQAGSASASPHSPSPVVQGDYYGTAAAAATSSGEPSPRSSGKHAFYRGIRCRSGKWVSEIREPRKARRIWLGTYPTPEMAAAAYDVAARALRGADAVLNFPGAIASRAAPASASPADIRAAAAAAAQAQLEYSQSQGAASNPLAAAAAQGRHQQQHHGASSTATADAAGYTAPQQEMGTDEFMDEEAIFEMPQLLRNMAAGMMMSPPRLSPDTSDESPDPSEAGESLWSYHDP

SEQ ID NO: 390 - protein, 506 aa, Zea mays
MGIQGNKAATHEHDFLSLYAAAAAAAAAKDAPLLLHDSKTPPPSQGNFLLKTHDFLQPFDQKPGAPPEPSPLPAPAAEIRHRQQVAVAKQRALPLPLPGGVGTFSISPAPVSVALPSAVVKSEPPPFVLWGQPAATLQPGARGHQQQWALPFAGSLQVSPPPQQAQPDRKGRGGGGVMDSGSRSSGGAGFDDEDGLTTRREVSSSLQDLAVRVDWKGGSCSDGGTNQGPNTPRSKHSATEQRRRSKINDRFQILRELLPHNDQKRDKATFLLEVIEYIRFLQEKAQKYEATFPEWNQENPTMLPWSKGQIPGDSPPDPSHFVRNGSSPGSNFTGKLDDNHTSAAASGALDQAETNHVASGCYRSSETPANITNNAISQSQPQWTGPSPVDDSAVKSEMLNSQELAIDEGMISVSSTYSQELLISLSHALQSSGVDLSQTSISVQINLGKRAGKRSASAGGVSSNSKEPPADPASSNELGGHHVTTLGASADGLLPHATKRHKRDNS

SEQ ID NO: 391 - protein, 212 aa, Zea mays
MSDRGGPASPRSGKHPFYRGIRSRSGKWVSEIREPRKTRRIWLGTFPTAEMAAVAYDVAARALRGPDAALNLPHLAASRPAPASTSADDIRAAAAEAAASLQQPDHQPPAHGSAAGRGIAAAAAGATQQQHQHQQQAGGSSGAAQHEGGGGGAGNPYFLDEEALFETPQYLRNMAAGMMMSPPRFGRNSSDDSPDHPSSSDAGDSLWNYRDP

SEQ ID NO: 392 - protein, 429 aa, Zea mays
MQLFQGEKPAHDFLSLHTGGGPSSPVQQQHPAQGYESGAHSSLKPMKLDRRRRGGGGGGAIDMAPSSGLESDSEEHVLPGGVGTFSIRQVASATRSRGEAAGHGVVSGAFPPAVHVSRTEEGPPHGAESGARAHSGPLAMWQDSGVDQRSRGARGGEGRSSGSSADQGPSTPRSKHSATEQRRRTKINDRLEILRELLPHGDQKRDKASFLLEVIEYIRFLQEKVQKYESAQPEKNHEDSSMPWAKVYYRSCWKNTENIIQGGGLAPSTKDENKEQYDSKQTTVASSALFDTQSARETSANDISSQKATSKAKCRADNSVPGKQPPWLSMSTSDADNKTLSKNEKQTLQEDTQSLSDAYSQGLLNRLTQALKRSGVDPSQASISVEISMDRRATEPNNIHDNLKDHECEDIIHVTKKLRGERSKISSSN

SEQ ID NO: 393 - protein, 278 aa, Zea mays
MAEKQPPAPHSPSPAVQVQPAGPAAGGHSHHQAASASASGPASPHSPSPVVQQGDGTSSARAAAITAPPMATTTATSSGEPSPRSSGKHAFYRGIRCRSGKWVSEIREPRKARRIWLGTYPMAEMAAAAYDVAARALRGADAVLNFPGAIASRAAPASASPEDIRAAAAAAAAAAQLEYSHQGRTANPPPPPASPPSPAAAAAQDWHQQHDAAASYTPQQEAGTDEFMDEEAIFEMPQLLRNMAAGMMMSPPRLSPDTSDESPDPSEAGESLWSYRDP

SEQ ID NO: 394 - protein, 489 aa, Zea mays
MDGFVDPFVPEQAWPQDAMFIGSSWPCAGAGATSLADPAGTYAYLGAQAAPGQGAGFHLQDGSSTALVPPLELHQQFLSAHLPGDDVTVTQEEGLGFEVNSALVAGMLGPVLSAPCAVSLADSAPVVCSSSNDSSGGSEQSGLPPPPRFLVLGEQPASWPSAFPRISSLAGEETSRSFGFGAVSDNDLVRGSSCVADVNKYPQIGNARLHVEDDVEFNTGKMLSFAPGLDFGDLQLSQKELSGLRHLNSGQQLSSFDATRNPEQSSNEASGGGTGLNAPPFMVPANGAAGNGAPKPRVRARRGQATDPHSIAERLRREKISDRMKNLQELVPNSNRTDKASMLDEIIEYVKFLQLQVKVLSMSRLGATEAVVPLLTQSQTENSGGGLLLSPRSGSGRQQQARGGSLPPPSSEVRDGAAFEQEVAQLMESDMTTAMQYLQSKGLCLMPVALASAISGQKGASSAAVQPENGGAKEMLRAVKPLASPIHGR

SEQ ID NO: 395 - protein, 242 aa, Zea mays
MPDRAESSPASSREASSSPPLSATETAARRSASGCGKRARARDGEKHPSYRGVRMRAWGKWVSEIREPRKKSRIWLGTFPTPEMAARAHDAAALVVKGPAAVLNFPEMAAALPRPATAAPRDVQAAAVRAAAMEPSMMLGPTAPLPRSALAPVKGQVHDDELEAIVELPPLDEDFSELLVPLGTASFSFHDATQASWRDPEWIDHDAGYMAAARDADELFGFGPDGDHGWAQPFGSTFLWNM

SEQ ID NO: 396 - protein, 100 aa, Glycine max
MASSSLSKQKASDSSWTPKQNKLFEKALAKYDKDTPDRWQNVAKAVGGKSADEVKRHYEILLEDLRHIESGHVPLPKYKSTGSSTNVEEEERLLKYLKLN

SEQ ID NO: 397 - protein, 100 aa, Glycine max
MASSSLSKQKASDSSWTPKQNKLFEKALAKYDKDTPERWQNVAKAVGGKSADEVKRHYEILLEDLRHIESGRVPLPKYKSTGSSTNVDEEERLLKYLKLN

SEQ ID NO: 398 - protein, 98 aa, Glycine max
MASSSAWTTKQNKKFENALAIYDRDTPDRWQNLARAVGGKTVEEVKRHYEMLVDDLKQIEEGHVPLPNYRNAAATGGGSIRGYSYMDEEQRMKVLSLH

SEQ ID NO: 399 - protein, 417 aa, Glycine max
MDRVFSVDDISDHFWPPPPIPVSGANTSSQMSRSASEWAFQRFIQEASASAPSPPSSSSPADVVFVEIDDQPKPTPPPPSHGGVLPSDPGPVALDSEEYQAFLKSKLNLACAAVAMTRGSLAKSQDPSPFSDGGSQPTNPSLVGSQTTSKGSIPSGNDQSKLQDKDINAPVGIPSIPAIQKKPAVAIRPSTSGSSREQSDDEDIEGETSMNDNTDPADVKRVRRMLSNRESARRSRRRKQAHLTDLETQVSQLRGENSTLLKRLTDVSQKYSDSAVDNRVLKADVETLRAKVKMAEETVKRITGLNPMPHAMSDISSLGLPSFDGRSPSDTSADASVPVQDDPHHHFYQPTLNNPIPSHDPIVNNGLGGISSIENVQQQNAAAVVGGNKIGQTASLQRVASLEHLQKRIRGGPPSEQ

SEQ ID NO: 400 - protein, 342 aa, Glycine max
MELSLDLSLGFVPKPLSLFFADVSANRDKVATLDGFVQRLEEELKKVEAFKRELPLCILLLNDAIARLKEEKVKCSGMQDPPLKTSSGGNKNESSEKMNWMSSAQLWSTQKTKSRNEEDDRSVPANPINGNSCVLEKEGSQVPRFGLMARASELSHSNSKSVGGDISSGSSLLRVEVQSQPQPPQHMQQNPRKQRRCWSPELHRRFVDALQQLGGAQVATPKQIRELMQVEGLTNDEVKSHLQKYRLHVRRFPVSSTGQADNGSWMSQDESGDKSKGNNMSQSGSPQGPLTPLILGGGGGGSAKGLSSPGQNSVDGEDEQSDCRNWKGGLHHHQLEADNQCL

SEQ ID NO: 401 - protein, 365 aa, Glycine max
MGIERGGLKGFRSGWSVPPKKPCDSCKLASAALFCHLDSAFLCIACDSKIHCANKLASRHERVWMCEVCEQAPASVTCKADAAALCVTCDSDIHSANPLAQRHERVPVEPFFDSAESIVKASATASFGFVVPSDDGAASDVFAPDDSDSAAWLIPNPNFGSKLMDAPEIKSKEIFFSEMDPFLDFDYSNSFQNHNSAVNDSVVPVQTKPSLAPPPINNHQHHHQSETCFDIDFCRSKLSSFNYPSQSLSQSVSSSSLDVGVVPDGNTVSDMSYSSGIVVSGGQGATQLCGMDREARVLRYREKRKNRKFEKTIRYASRKAYAETRPRIKGRFAKRTEIDSDVERLYSPGAAALMLDTPYGVVPTF

SEQ ID NO: 402 - protein, 336 aa, Glycine max
MRAGKGSQEEDEYEEEEFGSSKKQGTSSAPNANKADGKAIDKASAIRSKHSVTEQRRRSKINERFQILRDLIPHSDQKRDTASFLLEVMEYVQYLQEKVQKYEGSYQGWGQEPLKLMPWRNSHWRVQSFAGQPTAVKNGLGPVSPFPVKFDESNASISPTMLSGTQNTIDPYQSRDIVNKTAERQPDLVNKGMPLPLAMHANMSVPVRSDGVLAHPLHGTVSDPQSTECPTTSEPQNQQDEFTVEGGTISISSAYSQGLLNNLTQALQSAGLDLSQASISVQINLGKRGNKGLSCGTSSPKHHDNPSSNNQTIAHFRDAGSGEDSDQVQKRMKTYK

SEQ ID NO: 403 - protein, 205 aa, Glycine max
MFSINHFSAPDANSPGSGSGTSRPVPALSDEDYFLAASNPKKRAGRKKFRETRHPVYRGVRRRDSGKWVCEVREPNKKSRIWLGTFPTAEMAARAHDVAALALRGRSACLNFADSASRLPVPATAEARDIQKAAAEAAEAFRPGKDDGAVVATATEREEEEEKVVPEYLRNMVLMSPTHCFGSDEYGSADVEFDDAEVRLWSYSI

SEQ ID NO: 404 - protein, 245 aa, Glycine max
MEYSQYTTYSAEGVEAETYTSSCTTPSRSKKRNNNNTRRFSDEQIKSLETMFESETRLEPRKKLQLARELGLQPRQVAIWFQNKRARWKSKQLERDYGILQSNYNTLASRFEALKKEKQTLLIQLQKLNHLMQKPMEPSQRCTQVEAANSMDSESENGGTMKCKAEGKPSPSSLERSEHVLGVLSDDDTSIKVEDFNLEDEHGLLNFVEHADGSLTSPEDWSAFESNDLFGQSTTDDYQWWDFWS

SEQ ID NO: 405 - protein, 320 aa, Glycine max
MMEHNIIVNNNNVIAPFVIKTYNMVNDPTTDKLIMWGPANNSFIVLDPLDFSHSLLPAFFKHNNFSSFVRQLNTYGFRKVDPDRWEFANEWFLRGQKHLLRNIARRKHGGAGRSNFNLHSHHHPLKVEELDDEAMVMEIARLKEEQKALEEELQGMNKRLETTEKRPQQMMAFLSKVVEDPQVLSRILREREKKHLGEKKRRLIPPPTTTAATTSSSSSSGIKTEFEEDEGNYNIMSSSPETGLEIDNNNICSPLAAGYWGEQGCHGYNRGAVTAPLTVVAPAVPTMGGGYLGRGVFFGEMAAEGNAVPPYPFSLLEGGF

SEQ ID NO: 406 - protein, 326 aa, Glycine max
MERSGGMVTGSHERNELVRVRHGSDSGSKPLKNLNGQICQICGDTIGLTATGDLFVACHECGFPLCHSCYEYELKNVSQSCPQCKTTFTSRQEGAEVEGDDDDEDDADDLDNGINYGQGNNSKSGMLWEEDADLSSSSGHDSHIPNPHLVNGQPMSGEFPCATSDAQSMQTTSDPMGQSEKVHSLPYADPKQPGPESDEEIRRVPEIGGESAGTSASRPDAGSNAGTERAQGTGDSQKKRGRSPADKESKRLKRLLRNRVSAQQARERKKAYLIDLETRVKDLEKKNSELKERLSTLQNENQMLRQILKNTTASRRGSNSGTNNAE

SEQ ID NO: 407 - protein, 329 aa, Glycine max
MYHSKNVPSASLIGGNSLSHGQHIDCGGSTMDPGSGGNGLSNNSNLTSKQRLRWTHELHERFVDAVAQLGGPDRATPKGVLRVMGVQGLTIYHVKSHLQKYRLAKYLPDSSSDEGKKADKKETGDMLSNLDGSSGMQITEALKLQMEVQKRLHEQLEVQRQLQLRIEAQGKYLKKIIEEQQRLSGVLSEAPGSGAVAVVPGDACQEPDNKTDPSTPDPEKAAKDRAPAKSLSIESFSSHPEPMTPDSGCHVGSPAESPKGERSAKKQRVTMDGVYSKPEMVLPHQILESSMSSYQQPNTVFLGQEQFDPSLDISTKSDEELVKIGGGNL

SEQ ID NO: 408 - protein, 345 aa, Glycine max
MCGGAIISDFIPAAAIAGSRRLTADYLWPDLKKRKSDLDVDFEADFRDFKDDSDIDDDDDDHQVKPFAFAASSRLSTAAKSVAFQGRAEISANRKRKNQYRGIRQRPWGKWAAEIRDPRKGVRVWLGTFNTAEEAARAYDAEARRIRGKKAKVNFPEAPGTSSVKRSKVNPQENLKTVQPNLGHKFSAGNNHMDLVEQKPLVSQYANMASFPGSGNGLRSLPSSDDATLYFSSDQGSNSFDYAPEISSMLSAPLDCESHFVQNANQQQPNSQNVVSIEDDSAKTLSEELVDIESELKFFQMPYLEGSWGDTSLESLLSGDTTQDGGNLMNLWCFDDIPSMAGGVF

SEQ ID NO: 409 - protein, 182 aa, Glycine max
MASSSSLSSSKRHPLYHGIRCRGGKWVTEIREPRKTNRIWLGTFLTPEMAAAAYDVAALALKGGEAVLNFPDSVGGYPVPASKSPADIRTAAIAAAELMKPEASHNNNNVNASTTNEAEVVQYDNNNVFTSFDTEFMDEEAIFSMPSLLVDMAGGMLLSPPRMSPPSDDSTQSYVGETLWNF

SEQ ID NO: 410 - protein, 507 aa, Glycine max
MDPKGSLCAKNCTRTSSLTSPGNGLQTNLSSDPPSFYGVRIESPFKEFIQPSPPTQSVLPGESNADIDIPDQENCPLSNSSHTSKLQDWNPSAMLNNLSFLEEKIHQLQDLVHVIVNKKCQPFGQPHELVTQEQQLITADLTSIIVQLISTAGSLLPSVRHTLTNTNPLVGQLDQLHGINLPFGSEPSSGIRPQNNSGNKLFDQSTQNDLPNKLEMEQNYNMEEHEPKDEEDADEGENLPPGSYEILQLEKEEILAPHTHFCTICGKGFKRDANLRMHMRGHGDKYKTPAALAKPHKETGSEPKLIKRYSCPYAGCKRNKDHKKFQPLKTILCVKNHYKRTHCDKSYTCSRCNTKKFSVMADLKTHEKHCGKDKWLCSCGTTFSRKDKLFGHIALFQGHTPAIPLDDTKGVAEPPDIQNRESNNKVESINFCFGSNPSTENVVQNIMDMKGNIDDPMNYFSSLNFEGCNFGAFNEFSQPPFEDSEASFSFPMSGSYNYAPKFDSDNL

SEQ ID NO: 411 - protein, 910 aa, Glycine max
MMGDGGVISSAATMMEAPPPDGTTTTSMDFDYMGELFLDGCWMEASADGSDFLLQSPSFSNTLFDPSFSWPALETNHNESQVAAFGSQQESHNNNMVSVVAGGDYSQQFQSETHSVEGASEGIRRWWFAPTHTPTPSPGPGPSIMEKLIRALMWIKDYNRNKDMLIQIWVPVHKEGRPILAADDLLFSLESKSLNLAKYREISVTYKFSAEESDSKELAWGLPGRVFRDKVPEWTPDVRFFKIDEYPRVDHAQEYDVRGTLAVPIFEQGSKTCLGVIEVVMTTQQINYGPELESVCKALEAVDLRSSKQLSIQNVKQACNRSYEAALPEIHEVLRSACEMHKLPLAQTWVPCVQQGKEGCRHSEDNYLLCISPVEHACYVGDPSIRSFHEACTEHHLLKGEGVAGGAFMTNQPCFSDDITSLSKKDYPMSHHARLFGLRAAVAIRLRSIYNSTDDFVLEFFLPVDCNDIEEQRKMLTSLSNIIQRVCRSLRVIREKELEEANLSVNEVIALADSGFTRDEICSEPQQKGMVASLDTEEKSSETMGRKFSEPRQQQESPILKGNLDCVRECSTSVEGNLSSPGTSKTGERRRVKAEKTITLQVLRQYFAGSLKDAAKNIGVCTTTLKRICRQHGIKRWPSRKIKKVGHSLQKLQLVIDSVQGASGAFQINSFYSNFPDLASPNLSGTGFFSTLNQSDNPNSTSTQPEHGSLSPEGASKSPSSSSSQSSISSHSCSSMSELQQQHTTNIASDKDPATVGEYSADVVLKLIRNEAKLKSLSQDRAKLLPRSLSQETLGEHPKTQYQLPLLKTSSSKVDSHRVKVTYGDEKTRFRMLKNWVYEDLLQEIGRKFNVSDMSKFDVKYLDDDCEWILLTCDADLEECIDVCQSSESGTIKLSLQPSSHSVRSSLEFR

SEQ ID NO: 412 - protein, 370 aa, Glycine max
MNYLYPVKEEYLESPPPSSSSPTTGVDESAMVPPPRPMEGLHEIGPPPFLTKTYDAVEDPTTSHIVSWNRGGASFVVWDPHAFSRDLLPRYFKHNNFSSFVRQLNTYGFRKIDPDRWEFANEGFLRGHRHQLASIRRRKQPSRPYSSSSSSQQAQGHCVEVGRFGLDEEVDRLRRDKHVLMMELVRLRQQQLNTRSYLQAMEERLRGTEIKQQQMMAFLARALKNPTFIQQLLQQKEKRKELEEAMSKKRRRPIEGGPSGVGEPSSGGEEGRSSVKVEPLVLGEYGFGVSELEVLAMEMQGYGRGRREQEEEPEALESQERLEKELDEGFWEELFSEGFEGELDIPTSQDQDEDVSVLANRFGYLGSSPK

SEQ ID NO: 413 - protein, 348 aa, Glycine max
MLDGEATMGTWARMCDTCRSAPSSVFCRAHTAFLCATCDARLHASLTWHERVWVCEACERAPAAFLCKADAASLCASCDADIHAANPLASRHHRVPILPIAAAPGNNDNDNVDDADLDDDDETASWLLLNPVKSASVPNNNNTNNGFSYNGEVDEYLDLVDDCDNHHFASVATTTDHYSHQHQHFGVVSHKSYAGDSVVPVQHHQHFQLGLEFDNSKAAFSYNASVNQSVSVSSMDIGVVPESPMRDVSIGHTRTPKGTIDLFSGPPIQVPSHFSPMDREARVLRYREKKKTRKFEKTIRYASRKAYAETRPRIKGRFAKRTDVEAEVDQMFSTTLITEVGYGIVPSF

SEQ ID NO: 414 - protein, 211 aa, Glycine max
MVRGKTQLRRIENATSRQVTFSKRRNGLLKKAFELSVLCDAEVALIIFSPRGKLYEFASSSMQDTIERYRRHNRSAQTVNRSDEQNMQHLKQETANLMKKIELLEASKRKLLGEGLGSCSLEELQQIEQQLERSVSSVRARKNQVYKEQIDQLKEKERALYAENARLCEQYGGIQPQPATKDPKEIQPYAESSPSSEVETELFIGLLRSSY

SEQ ID NO: 415 - protein, 720 aa, Glycine max
MGLIDLNTTEDDEAAPLSASSSHSGISTSASTLVVSPPPSVCLELWHACAGPLISLPKRGSVVVYLPQGHFEHVQDFPVNAFDIPPHVFCRVLDVKLHAEEGSDEVYCQVLLVPESEQVEHSLREGEIVADGEEEDTGATVKSTTPHMFCKTLTASDTSTHGGFSVPRRAAEDCFPPLDYSQQRPSQELVAKDLHGLEWRFRHIYRGQPRRHLLTTGWSAFVNKKKLVSGDAVLFLRGNDGELRLGIRRAAQLKWAGSFAVPSGQQLNPATLMDVVNALSTRCAFSVCYNPSLDCSYSVGMRFRMRFETEDAADRRFTGLIAGISDVDPVRWPGSKWRCLLVRWDDIEAARHNRVSPWEIEPSGSASNSSNLMAAGLKRNRIEMTSAKLEFPNPNGIQTSDFGESLRFRKVLQGQEILGVNTPPFDGINAQSPWLYELGRCYPGSNCSGIPPTGNNIRVPHPASDFSCNGIGFSESFRFQKVLQGQEILPSQPYGRALSIEEARANGRYGFYDGCQLLNSRNGWSAQMHDNASHLHASVTPAQVSSPSSVLMFQQAVNPVSNCDYNINKCNKEMEGRIHYQGLYTSEMKGRTLASSPSDDLIVSRRAPEGASSIGMFDVHNQLGSSQLHESVSALRSSQKLVSSCKSSCRLFGFSLTEDTHVANEEVSASTITLPLSSGPSFTRLVEDEFHPGHSHPSKAVGSNCTKGVIVHFMVHTDCG

SEQ ID NO: 416 - protein, 244 aa, Glycine max
MENIGEEYKHYWETNMFLQTQELDSWGLDEALSGYYDSSSPDGAASSAASKNIVSERNRRKKLNERLFALRSVVPNISKMDKASIIKDAIEYIQHLHEQEKIIQAEIMELESGMPRKSPSYGFEQEQLPVVLRSKKKRTEQLYDSVTSRNTPIEVLELRVTYMGEKTVVVSLTCSKRTDTMVKLCEVFESLKLKIITANITSFSGRLLKTVFIEANEEEKDHLQIKIQTAIKALNNDPLSPMSI

SEQ ID NO: 417 - protein, 227 aa, Glycine max
MSCNGCRVLRKGCSESCMLRPCLQWIETAQAQGHATVFVAKFFGRAGLMSFISNVPENQRPALFQSLLFEACGRTVNPVNGAVGLLWTGNWHVCQAAVETVLRGGTLRPMPELMGLDAPAAAATDEASEAEVACTDTWRIRNPNPNCRFTSSRSSGCGGGGKRKRSEELAKLQAQPNLDLRLTPVFSQKVESRRPESPSMTSVESGTTTENRFGDQWGHRKVLNLFI

SEQ ID NO: 418 - protein, 336 aa, Glycine max
MRAGKGSQEEDEYEEEEFGSSKKQGTSSAPNTNKADGKAIDKASAIRSKHSVTEQRRRSKINERFQILRDLIPHSDQKRDTASFLLEVIEYVQYLQEKVQKYEGSYQGWGQEPSKLMPWRNSHWRVQSFAGQPTAVKNGLGPVSPFPGKFDESNVSISPTMLNGSQNTIDPDQSRDIVNKTAERQPDLVSKGIPLPLAMHANMSVPVRSDGVLAHPLQGTVSNAQSTECPTTSEPQNQQDELSVEGGTISISSAYSQGLLNNLTQALQSAGLDLSQASISVQINLGKRANKGLNCGTSSLKHHDNPSSNNQTIAHFRDAGSGEDSDQAQKRMKTYK

SEQ ID NO: 419 - protein, 188 aa, Glycine max
MRSSNGTSSSRASNGNTGRHPVYRGVRRRSSGKWVSEIREPKKPNRIWLGTFATPEMAAIAYDVAALALKGKDAELNFPNSASSLPIPASSAAHDIQMAAALAATAVGAANDALEGSQGGNVSVSLAEEFSGGNLNHFVDEDLIFDMPNILVNMAEGMLLSPPRFDNFAATDYEYMDEDPNLWGFPNY

SEQ ID NO: 420 - protein, 79 aa, Brassica napus
MASNSMSSNASWTRKENKLFERALAIYDQDTPDRWHNVARAVGGKSAEEVRRHYELLIRDVNDIESGRYPQPTYRSNGN

SEQ ID NO: 421 - protein, 79 aa, Brassica napus
MASNSMSSNTSWTRKENKLFERALAIYEQDTPDRWHNIARAVGGKSAEEVRRHYELLVRDVNDIESGRYPHPTYRSNGN

SEQ ID NO: 422 - protein, 98 aa, Brassica napus
MASSSMSSSWTSKQNKMFERALAVYDKDTPDRWQNVAKAVGSKSAEEVKRHYDILVEDIENIEQDLVPLPKYKTIDVGSKSRGINDFDLRLMKNMRIQ

SEQ ID NO: 423 - protein, 158 aa, Brassica napus
MNKTEMGSPASGNCSSGLQNYGSESDERKRKRKESNRESARRSRMRKQKHLDDLTAQVAYLREENSHIVAGIAVTTQQYVTIEAENSILRAQFLELNQRLDSLNEIVEIAGGFWMETGQGGGVIGFYDGVMNPLNLGFYNQTLMGSASTVPADVFNCC

SEQ ID NO: 424 - protein, 330 aa, Brassica napus
MAKKGDNMDYTLKKKRCEEYIEALEEEQKKIQVFKRELPLCLSLVTQAIESYWKELSEFSRSEHIQSEGSERTTSEFEGRDGCIALSEEFVPIKSCERVKDDEAENNVDKKKSEWLQLWNQSPDPQPIEDQTTTVVAAEVNENCGAFQPFQKGKLAYSQPLKAITPTPKASSSTAETGGNKKEMEQQKQLQMHRKQRRCWSSELHRRFLHALQRLGGSHAATPKQIRDLMQVDGLTNDEVKSHLQKYRLHTRRPATPTLTNGCESPQQQQLIVVEGIWVPSKDGVNNRVYAPVAVQPPPRSSPSEPRSIQRCKPPTASSSTHPSHLLPLS

SEQ ID NO: 425 - protein, 289 aa, Brassica napus
MASRPCDSCRSAAATLFCRADAAFLCGECDGKIHTANKLASRHERVLLCQVCEQSPAHVTCKADAAALCVTCDRDIHSANPLSRRHERVPVTPFYDAPSNADVSMEAASWLLHNPSVKEGGVEIPNLFADLDYSGVDPKMEASENSSGNDGVVPVQTRALFLSEDYFNFDISASKTTFPHGFSCINQTVSSTSLDVPLVPEGGAVVEMSRTTATPALQLSPAEREARVLRYREKRKNRKFEKTIRYASRKAYAEVRPRIKGRFAKRTDSRVNDGGEVGVYGGFGVVPSF

SEQ ID NO: 426 - protein, 314 aa, Brassica napus
MEKVFSVEVTSCNNHLWSEPAKESDGTSGMNRSDSEWAFHRFIQESSAGEDGVSVSGPSSPVDSHEYREILKSKLNLACAAVAMKRGAFIKRQDTSGRSENGGAAYTSSASDQGSLASSTKATPVMSSTITSGSEFSGDDEEADGETNMHPTNVKRVKRMLSNRESARRSRRRKQAHLSELETQVSQLRVENSNLMKGLTDVTQTFNDASVENRVLKANLETLRAKVKMAEETVKRITGFNPMFHTMPQVSSVSNPSETSNSLDTSSQVTTPEISSSSNKSKALMGCKMNRTESMRRVASLEHLQKRIRSVGDK

SEQ ID NO: 427 - protein, 184 aa, Brassica napus
MNIPGTSKENSGRHPLYKGVRQRKNSDKWVSEIREPRKPNRIWLGTFSTPEMAAIAYDVAALALKGTQTGLNFPNSASSLPVPASMSPGDIQAAAASAAAAFGAARDAIVVANNSSVERSNVMMNGSYENTNGFMDEDLIFDMPNVVMNMAEGMLLSLPCQFTFDAASEADDYAGEDDYLWNFT

SEQ ID NO: 428 - protein, 252 aa, Brassica napus
MSCNSGMSFFPSSFMIQNSYEDDHPHQTPALAPLLPSCSMPQDLNGFASFIGKQILEEDYSDDGSQMGEKKRRLNMEQVKTLEKTFELGNKLEPERKMQLARVLGLQPRQIAIWFQNRRARWKTKQLEKDYDTLKLKFDALKAENDRLQTHNEKLQAEIMGLENKEQTKSINLNKETEGSCSNKSDNISDNPRLDISRPPPPSIENTITAGHPPPPQTVGRHFFPPSPATATTTTTTLQFFQNSSSGQSIYG

SEQ ID NO: 429 - protein, 315 aa, Brassica napus
MEDDKNNNTSSTNTNVIAPFVAKTYQMVNDPSTDWLITWGPAHNSFIVADPLDFSQRILPAYFKHNNFSSFVRQLNTYGFRKVDPDRWEFANEHFLRGQKHLLKNIARRKHARGMTDAEDGEIVKEIERLRDEQRELELEIQRMNQRIEATEKRPEQMMAFLYKVADDPDFLPRMMLEKERTKQLVSDKKKRRVTVKSEEGAEEEERVFGVVSPSPSPSPENSIGWVVPMQRQGTFGSYYNETGMVTNSMISTSSKSSSLTSTLSLLESVNRGGGGGCGSIQGETRDKEAATFGGVVESNPQTPPYPFSLFRGGF

SEQ ID NO: 430 - protein, 162 aa, Brassica napus
MQEQATSSLPSSSERSSSSNPHLEIKEGIESDEEIRRVPEFGGEATGKEASGSANGQDRTQIAVGEGQRKRGRTPAEKETKRLKRLLRNRVSAQQARERKKAYLGELETRVKDLENRNSELEERLSTLQNENQMLRQILKNTTGNKRGGGGGGGGSNADASL

SEQ ID NO: 431 - protein, 437 aa, Brassica napus
MNGHRLVPTAQEECNKGIQKACSSSLSPAYNFLNVQPERTKSPFIRSQSPDWPKNSTFSRSSTFCTNLYSSSSSANETQKHLGNSLPFLPDPSASASGVESARSPSVFSEDLGNPFDGDNNSSLVKDFFNLSADACSNGGGYHDLDCSNDTLSDQLELQFLSDELELAITDRAETPRLDEIYEKPMASPNPVTVLSPSQRCDAGAMCIDPVSSLPSPRSSAAANHKPRMRWTPELHESFLKSVNKLEGPEKATPKAVLKLMNVEGLTIYHVKSHLQKYRLAKYMPEKKEEKKNVNSEEKKLALSNSEADEKKKGAIQLTEALRMQMEVQKQLHEQLEVQRVLQLRIEEHAKYLEKMLEEQRKAGRLFSSSSSSQTLLSPSDDETRPDSPNMSKTEASLPQPSSSAKNIASETEDDQCESPQKRRRLENNTKPQDSER

SEQ ID NO: 432 - protein, 242 aa, Brassica napus
MCGGAIISDFVPILTKAKGRKLTAEELWSELDASAGDYLWGFHPTSKLQSTNQEEVALKDEAVVNKREPATEKRRRKNVYRGIRKRPWGKWASEIRDPRKGTRVWLGTFNTAEEAAMAYDVAAKRIRGDKAKLNFPDLIPPPATPALTSSPPSDDQPPAKKLCLLSQSELTQLSFPDECIGFGNGGQFQNHSYGFEPGYDLKQQISSLESFLELDGTTAEQPSQLDESVDMWMIDDVISSYA

SEQ ID NO: 433 - protein, 95 aa, Brassica napus
MASNSRSSSWTFKQNKMFERALAVYDKDTPDRWHNVAKAVGGKSAEEVKRHYDILVEDLINIETGRVPLPNYKTFESNSRGINDFNTRLMKNLKI

SEQ ID NO: 434 - protein, 431 aa, Brassica napus
METGEDDLCKNNWGSASILDYEMAREDEEEEPNLHVFKASSSCQDNNNNGGQASVDFLQGVKAQAWDPRTMLCNLSFMEHKIHELQGLVHLILGRNGQLQDEQRQLVTADLTSIIIQLISTAGSLLPSVKHHNMSTTAPGSAFHEMKNEDDAEEGENLPPGSYEIKQLEKEEILAPHTNFCTICGKGFKRDANLRMHMRGHGDEYKTPAALAKPTKETVPGSEQMLVKRYSCPFPGCKRNKDHKKFQPLKTILCVKNHYKRTHCDKSFTCSRCHTKKFSVIADLKTHEKHCGKNKWLCSCGTTFSRKDKLFGHIALFQGHTPAIPLEETKPSAAASSQRGSSGCGNNNNNAGMVSFNLGSATNANQETSQPCFMDGKISFEESFSPLSSDTCNFGGFPRSIFDDSFQMLISSACGCSPINGGDGSVSDTSV

SEQ ID NO: 435 - protein, 761 aa, Brassica napus
MEDSLLQTENTVMDTEFMDGLLLDGCWLETTDGSVSPFDPSSFKWPPTQDTSSICTSEVVSQTYGQDCASLDEFPWNKRWWIGPGGGGSSITERLLWVPVNRGGKRVLTTREQPYSHDPTCQRLANYREVSVNYHFSAEKDDSKALAGLPGRVFLGRLPEWTPDVRFFRSEEYPRVHHAQDCDVRGTLAIPVFEQGSKVCLGVIEVVMTTEMVKLAPELESICRALQAVDLRSTEVQIPPSLKGCDLSYKAALPEIRNLLRCACETHKLPLAQTWVSCLHQSKSGCRHNDENYIHCVSTIDDACYLGDPTVREFHEACSEHHLLKGQGVAGQAFLTNGPCFSPDVSNYKKSEYPLSHHANIFGLHGSVAIRLRCIHTGSVDFVLEFFLPKDCGDVEEQRKILNALSTIMAHVPRSLRIVTDKELEDESEVIVTPKIEITSEHTKDWLHQSNNPENLGLIFDVGDKASDEFGLKRGFGYTRDSNINESSTFSSKMAETKRTKAEKTITFDVLRQHFAGSLKDAAKNIGVCPTTLKRICRQHGIQRWPSRKIKKVGHSLQKIQRVIDSVEGVSGLLPIGSFFANFPNLASSQEPSLQGKTSLSPQPLQLSKSPVSPYSHSSSSSQCCSSETQLNSDTTTTTTDVGGGVLTLSSLENIPQSTNLSLSSLDNDFLRIKVSYGEEKIRFRMGNSRRLSDLLWEIGKRFSIEDMSRCDLKYLDEDNEWVLLTCDEDVEECVSVCSTTRSHTIKLLLHVSSHCYNSWQ

SEQ ID NO: 436 - protein, 442 aa, Brassica napus
MESVQSAPSANSNSPSIPPPVSSVPPFLSKTYDMVDDPSTNDVVSWSSGNNSFVVWNVPEFSKVLLPKHFKHNNFSSFVRQLNTYGFRKVDPDQWEFANEGFLRGQKQLLKGIVRRKPQNQQQTQVQNSSVSACVEVGKFGIEEEVERLKRDKNVLMQELVRLRQQQQATEHQLQNVGQKVQVMEQRQQQTMSFLAKAVQSPGFLNQLVQQNNDGNKHIQGSNKKRRLPGDEEESCGELNRQIVKYQPSINEAAQTMLRQVLNRSSSPVSNNPESFLLSDAPSSNSPNSAHSAMNQVHEAGLVDHLQAGPSPSQGGVAAAASWSPESELVGLETGDGVCFDPIMAALGGSLEIESDEVSPVGEGEMTELQNEAPKLPGVQDSFWEQFFADETAVIGEGDVIISEAVENCEMVMEQEPKEWKQQEMNHLTEQMELLSSEAQRK

SEQ ID NO: 437 - protein, 337 aa, Brassica napus
MLKQEGNWAQTCDTCRSAACTVYCRADSAYLCTSCDAQIHAANRLASRHERVRVCQSCERAPAAFFCKADAASLCTACDSQIHSANPLARRHQRVPILPISGSMVTNRSSETTEAEDIVVVGQEEEDEAEAASWLLPTSVKNCGDNNNNNNNSQDNRFSVGEEYLDLVDYSKYQQDYNVPQRRSYVADGVVPLQVEVSKSLSHMHHEQHNFQFGFTNVSSEASPIHMVSLVPESTLSETTVSHPRSPKAAMEELPEAPVQMLSPMERKARVMRYREKKKTRKFEKTIRYASRKEYAEKRPRIKGRFAKRNEVDAEEADKAFSSMVMFDTGYGIVPSF

SEQ ID NO: 438 - protein, 213 aa, Brassica napus
MVRGKTQMKRIENATSRQVTFSKRRNGLLKKAFELSVLCDAEVSLIIFSPKGKLYEFASSNMQDTIDRYLTHTKDRISNKPVSEENMQHLKHEAANMMKKIEQLEASKRKLLGEGIGSCSIEELQQIETQLEKSVKCIRARKTQLFKEQIEQLKQKEKALAAENQKLTEKWGSHEIKVWSSKNKESGRGDEESSPSSEVETELFIGLPSSSRK

SEQ ID NO: 439 - protein, 625 aa, Brassica napus
MYGELWKLCAGPVVDVPQAAERVFYFPQGHMEQLEASTQQDLNAVKPTKPLFDLPPKILCRVMDVRLQAEKDTDEVYAQIMLMPEGTVDEPMSPDPSPPESQRPKVHSFSKVLTASDTSTHGGFSVLRKHATECLPPLDMTQQTPTQELVAEDVHGYQWKFKHIFRGQPRRHLLTTGWSTFVTAKRLVAGDTFVFLRGENGELRVGVRRANRQQTNMPSSVISSHSMHLGVLATACHATQTRSMFTVYYKPRTSQFIISLNKYLEAMSNKFSVGIRFKMRFEGEDSPERRFSGTVVGVKDCSTHWKDSNWRCLEVHWDEPASISRPDKVSPWEIEPFVTSENVPHSVMPKNKRPRHYSEVSALDVGKTASNLWSSALTQSHEFAQSCITSQRNSPQQCYRDATEDAKNSDWSASPYSATLNNQMVFPVEQKKPETTASYRLFGIDLLSSSIPATEEKTAPTLPINITKPTPDSNSDPKSEVSKLSEEKKQEPAQASSKEVQSKEISSTRSRTKVQMQGVPVGRAVDLTVLNGYSELIDDLEKLFDIEGELKSRNQWEIVFTDDEGDMMLVGDDPWPEFCNMVKRIFIWSKEEVKKMTPGNQLRKLLTEVDTTLTTTISKTENHSN

SEQ ID NO: 440 - protein, 246 aa, Brassica napus
MDNVDQEFNNYWETNSFLQNEDFEYDSWPLEEAISGSYDSSSPDGAASSPASKNIVSERNRRQKLNQRLFALRSVVPNITKMDKASIIKDAISYIQGLQYEESKLEAEIRELESTPKSSLSFSKDFDRDLLVPVTSKKMKQLDSGPSRSLIEVLELKVTFMGERTVVVNVTCNKRTDTMVKLCEVFESLNLKIITSNLNSFSGMIFNTVFVEAEEEEQEVVRLKIETGIGAYNETQSPTLSIDSLY

SEQ ID NO: 441 - protein, 221 aa, Brassica napus
MSCNGCRVLRKGCSENCILRPCIQWIETADAQGHATVFVAKFFGRAGLMSFISAVPESQRPALFQSLLYEACGRTVNPVNGAIGMLWTGNWNICQAAVETVLRGGSLRPIPGLLAHGGGFAGFPSVTSEEGSRSRSTLDSSPKKRRRVDSSELDLSLNPNLSTKTTPSPTRQRSGTPSMNSEESVATTTTTTTSFCDATPTGERYGNGGGGEASKLLKLFV

SEQ ID NO: 442 - protein, 543 aa, Brassica napus
MELPQPRPFKAQGRKPTHDFLSLCSHPTLQPDPKPTPPPSSQGSHLKTHDFLQPLECVGAKEETSRIDTTRIASEKPPPPAPPPPLQHVLPGGIGTYTISPIPYFHNQQRIPKPELSPPMMFTAAAQTGGGNERIVVDENSNSNSSSYAAAASGFTLWDESGSGKKGQTRKENNAGERASIRADGAATMGQCPVVERRSQSLTNTPLSGFSSRSSSQGSGLKSQSFMDMLRSAKGTSQDDDLDDEEDFVMKKESSSTSQIHRDLRVKAEARGGGNDQKLNTPRSKHSATEQRRRSKINDRFQMLRQLIPNSDQKRDKASFLLEVIEYIQFLQEKTSKYETPYQGWNHEPAKLLNWQRNNQQLVPEGTVAFAPKLEEEKNNIPVPVLGTTQGVVIDRPETLNRATPATGAFPLSAQSNSFISPVIAGNPVNQLHTRVAASETLEPSQSSRGHTQPLKEEGGDEEVHAGNISISSVYSQGLVKTLREALENSGVDLTKASISVEIELAKQSSSFKDHEPRGLVSTGNDDPKQTRQPKRLKTNNTS

SEQ ID NO: 443 - protein, 237 aa, Brassica napus
MSNTSDSPTTGNKQTTTFPLASVALPSKTSDHPSPQSSPGSSSSPSPTPRPSHSAGGSSTKRTTTGLSGRHSFFRGIRLRNGKWVSEIREPRKTTRIWLGTYPVPEMAAAAYDVAALALKGPDAVLNFPGLALTYVAPASNSAADIRAAAARAAEMKQPDPGGVEKVMEPGQPGREEEEKAMLSSLEFMDEEAMLDMPNLLTEMAEGMLMSPPRMINPTMEDDSPENHEGDSLWSYK

SEQ ID NO: 444 - protein, 91 aa, Oryza sativa
MSSRSSSSSRNSNSVNMDSEWSKKENKLFEEALAYYGEGAPDLFHKVSRAMGGTKTADEVRRHYEILEDDLKLIEARRVPFPKYNTQGAWN

SEQ ID NO: 445 - protein, 85 aa, Oryza sativa
MSGSRSSSPNSKSEWSRKENKMFEEALAYYGEDTPNRWDKVASAMGGIKSAEEIRCHYEDLTDDVKTIESGRVQFPKYKTQGYWT

SEQ ID NO: 446 - protein, 101 aa, Oryza sativa
MSSSWTTKQNKVFERALAIYDRDTPDRWQNVARAVGGGKSVDDVKRHYEKLIKDVDRIDSTGGHQGSHYNSSNASSSSSSSSSNSRGSANEDQRRRYHNFQ

SEQ ID NO: 447 - protein, 425 aa, Oryza sativa
MERVFSVEEISDPFWVPPPPPQSAAAAQQQGGGGVASGGGGGVAGGGGGGNAMNRCPSEWYFQKFLEEAVLDSPVPNPSPRAEAGGIRGAGGVVPVDVKQPQLSAAAAAAATTSAVVDPVEYNAMLKQKLEKDLAAVAMWRASGTVPPERPGAGSSLLNADVSHIGAPNSIGGNATPVQNMLSGPSGGSGSQLVQNVDVLVKQPTSSSSREQSDDDDMEGEAETTGTARPADQRLQRRKQSNRESARRSRSRKAAHLNELEAQVSQLRVENSSLLRRLADVNQKYNDAAVDNRVLKADVETLRAKVKMAEDSVKRVTGMNALFPAASDMSSLSMPFNSSPSEATSDAAVPIQDDPNNYFATNNDIGGNNNYMPDIPSSAQEDEDFVNGALAAGKIGRTASLQRVASLEHLQKRMCGGPASSGSTS

SEQ ID NO: 448 - protein, 348 aa, Oryza sativa
MGLDVGEIGMGLDLSLDLKMFAARSAVRMAAAAAKEATGVEACIRSLEEERRKIEMFRRELPLCARLLADVIELMKEEAGKRRKDGDDAEAKAEDGDKTKWMSTAQLWVDSRGSDADSENDRRSGSTSPASRLLGGAEESSSRAVAPPPYFRREERVVLRPAMPLLPPASHRSPPPAAAAAATAAGDDHRHVVASSFATAVPSPVPAALSLQAQAQQQQQQARKSRRCWSPELHRQFVAALQQLGGPQVATPKQIREVMKVDGLTNDEVKSHLQKYRLHNRKSPGTASASHSIVLVGDLWASQEVSCSQSGSPQGPLQLSGSGVAVSAATAGDSCCEDDDKSEGYVRK

SEQ ID NO: 449 - protein, 332 aa, Oryza sativa
MEAVEDKAMVGVGGAVAAGYSSSSWGLGTRACDSCGGEAARLYCRADGAFLCARCDARAHGAGSRHARVWLCEVCEHAPAAVTCRADAAALCAACDADIHSANPLARRHERLPVAPFFGPLADAPQPFPFSQAAADAAAAREEDADDDRSNEAEAASWLLPEPDDNSHEDSAAAADAFFADTGAYLGVDLDFARSMDGIKAIGVPVAPPELDLTAGSLFYPEHSMAHSLSSSEVAIVPDALSAGSAAPPMVVVVASKGKEREARLMRYREKRKNRRFDKTIRYASRKAYAETRPRIKGRFAKRTADADDDDEAPCSPAFSALAASDGVVPSF

SEQ ID NO: 450 - protein, 301 aa, Oryza sativa
MKRGGAGVGGGGGGGDPGAYAAVLKTKLDLYCAAVAKSMEAKLQESSLGYLNLQASDTSQLVSQDSFNGYGSTRVTNSNAIHEDDDQGKPANSGTSKEQSDDDGDLEEDTDPVNAKRTRRMLSNRESARRSRKRKQAHLNDLESQVSQLRSENASLQKRLSDMTQKYKQSTTEYGNLQDDMNAMRRKVNIAEEAVRRVTGIGLQLFTTSEMPASSMPVSSGVSDAASAAAAAALVEDDWTNCSLPDEAIPVPSAAMALRSPSVRRVASLENLQKRIHAGDVTHFEAASALSLPEATACDNK

SEQ ID NO: 451 - protein, 214 aa, Oryza sativa
MEYYEQEEYATVTSAPPKRPAGRTKFRETRHPVYRGVRRRGPAGRWVCEVREPNKKSRIWLGTFATAEAAARAHDVAALALRGRGACLNFADSARLLRVDPATLATPDDIRRAAIELAESCPHDAAAAAASSSAAAVEASAAAAPAMMMQYQDDMAATPSSYDYAYYGNMDFDQPSYYYDGMGGGGEYQSWQMDGDDDGGAGGYGGGDVTLWSY

SEQ ID NO: 452 - protein, 276 aa, Oryza sativa
MNGRTQLASWARIAMDRGDHHHLQQQHQFLMPPPAPVVPPQLCMPAMMADEQYMDLGGGGAAAAPGRGGAGERKRRFTEEQIRSLESMFHAHHAKLEPREKAELARELGLQPRQVAIWFQNKRARWRSKQLEHDYAALRSKYDALHSRVESLKQEKLALTVQLHELRERLREREERSGNGGAATTAASSSSCNGSGSEEVDDDDDKRNAAAGCLDLEPPESCVLGGATCATPADVSVESDQCDDQLDYDEGLFPESFCATPELWEPWPLVEWNAVA

SEQ ID NO: 453 - protein, 298 aa, Oryza sativa
MTTTTAEGGGGVAPFVAKTYRMVDDPATDGVIAWGRDSNSFVVADPFAFSQTLLPAHFKHSNFSSFVRQLNTYGFRKVDPDRWEFAHVSFLRGQTHLLRRIVRRSSGGGGAKRKEEAGGCGGGGEAAAGDVDEESAVVALEVARLRREQREIEGRVAAMWRRVQETERRPKQMLAFLVKVVGDPQVLRRLVDRDNTNAAASNADDSAVHHQVKRPRLLLDSSSTTTTHGDRHLVTAAADGFYAGGCGPEAAAAAAFVPDDAVDFTGLYTGGDGFGNAVVDAGVDYPPAYAFPVVDSGY

SEQ ID NO: 454 - protein, 360 aa, Oryza sativa
MATTRASLTDPLLPSPAARAPVKAKKLSWSMLHASSKDERRGQSGEAEAEASGGVHANPSSPARMQEQATSSRPSSSERSSSSGGHHMEIKEGKEAPLRSLLLPFLDFHFTVPLSGMESDEEIGRVPELGLEPGGASTSGRAAGGGGGGAERAQSSTAQASARRRGRSPADKEHKRLKRLLRNRVSAQQARERKKAYLNDLEVKVKDLEKKNSELEERFSTLQNENQMLRQILKNTTVSRRGPVLLKIPKSGLREAAPAGCGGLREAEGDEKFVLNGFTAANLSFDGMATVTPNGLLMLTNGTNQLKGHAFFPALLQFHRTPNSMAMQSFSTAFVIGIISAFEDQGSGSPAAAGGSGRAA

SEQ ID NO: 455 - protein, 479 aa, Oryza sativa
MSSQSVVAVKQITAPDKIVETCPSTKHSAHKLFDVKPDFQGLIDDNLSSSSQSSSIKIELIRSSSLPNILPFQKRSSEPEPESPLSHVSHPNVSEPVYSNSSTFCTSLFSSSSMETEPCRQLGTLPFLPHPPKCEQQVSAGHSSSSSLLVPGGDGDIGNAHDEPEQSDDLKDFLNLSGGDASDGSFHGENNAMAFAEQMEFQFLSEQLGIAITDNEESPRLDDIYGTPPQLSSLPVSSCSNQSVQKAGSPVKVQLSSPRSSSGSATTNKARLRWTLELHERFVEAVNKLDGPEKATPKGVLKLMKVEGLTIYHVKSHLQKYRLAKYLPETKEDKKASSEDKKSQSGSSGNDSVKKKNLQVAEALRMQMEVQKQLHEQLEVQRQLQLRIEEHARYLQRILEEQHKVSISSNSLSLKPPAESQPESPKPTSEKKEAESEAGAATSAQPSSEDKSPDAECKSSPPVGSKRARVHVGDEHQCS

SEQ ID NO: 456 - protein, 334 aa, Oryza sativa
MCGGAILAEFIPAPSRAAAATKRVTASHLWPAGSKNAARGKSKSKRQQRSFADVDDFEAAFEQFDDDSDFDDAEEEDEGHFVFASKSRVVAGHDGRAAARAASKKKRGRHFRGIRQRPWGKWAAEIRDPHKGTRVWLGTFNTPEEAARAYDVEARRLRGSKAKVNFPATPAAARPRRGNTRATAVPPPATAPAAAPPRGLKREFSPPAETALPFFTNGFVDLTTAAAPPPAMMMTSSFTDSVATSESGGSPAKKARSDDVDSSEGSVGGGSDTLGFTDELEFDPFMLFQLPYSDGYESIDSLFAAGDANSANTDMNAGVNLWSFDDFPIDGALF

SEQ ID NO: 457 - protein, 90 aa, Oryza sativa
MAQQARAQWPQKQNKLFEQALAVYDKETPDRWHNIARAVGGGKSAEDVKRYYEMLEEDIKHIESGKVPFPAYRCPAAAGYQAERLKHLKI

SEQ ID NO: 458 - protein, 385 aa, Oryza sativa
MMMSSSADHFSNNNNNQAMYLEQDEDFSQMIMELCDFDASSTTQARHGGEAAAAAAGNARAVLTYLTFLEQKIGHLRGIISSTPNPPPQIVAAELSCIVVQLVSISKNLAAARRGGDDADADAKHDGSSDADEGADGDGERAPPRGSYEVVQIEKEEILAPHVHFCGVCGKGFKRDANLRMHMRGHGEEYKSAAALAKPGGSPSRSPAAADAAARRRFYSCPYVGCKRNREHKSFQPLKTPTCVKNHYRRSHCDKSFTCRRCNVKRFSVVADLRTHEKHCGRDRWVCSCGTSFSRKDKLFAHVAIFDGHSPALPPEDYDDDAASGQLPHAAGEAVGRTVDTNRFFSDGLMIKGSMEDERGSLSPMGLDYCEFDGIDLFAAAAFDF

SEQ ID NO: 459 - protein, 842 aa, Oryza sativa
MEEGDPQPSISLARTPSEGAAAAVDLDLLEQLLSADNAWLEVAANTSRSPNFFATPSNCLTDASVATTTPANSWWIQPSGASTSVRERFDQALAYIRETQSDADVLVQLWVPVKGNDGQLVLTTSGQPFTLDQRSNSLIQFREVSTKYQFSADVASGSSPGLPGRVFIGRLPEWSPDVRYFTSYEYPRINHAQYLDVHGTMGLPVFERGNYSCLGVIELIMTKQKLNFTSELNTICSALQAVNLTSTEVSSIPRAKLNSASYKDALPEILEVLRAACITHKLPLAQTWVTCAQQGKRGSRHSDENYKYCISTIDAACYVNEPRMQSFHEACSEHHLLRGQGVAGKAFTTNQPCFLPDIGSSTKLEYPLSHHAKIFNLKGAVAIRLRCTRTGIADFVLEFFLPTDCEVLEEQKAVLDSLSGTMRSVCQTLRVVTDKEMEDEAMREMNELNSFSPRGKNKVEELSFGDNTRGDREEASWTTLVGTSQKGSDLAELHTHGMLSHGGHGSSQAGDQTSKEGSKVKRRTKTEKTVSLQVLRQYFAGSLKDAAKSLGVCPTTLKRICRQHGINRWPSRKIKKVDHSLRKLQQIIDSVHGAETAFQLNTLYKDLTNTSVSSDNNLSGSVTVPLANQNNLDFEMHQHHRLSSNIPSTSLSHSSCSQSSDSSPSCSGGATKHSPQVGADQVRSGCLPQHSPVQTLQTEAASINEHFSGQEAPIDLLQDVAEKANGEQHMSQSPSSPKQTANVGMRVKVTFGSEKVRFRLKPECDFQELKQEISKRLSIADMNSLIVKYLDDDSEWVLMTCDADLHECFHVYKLADIQTIKISVHLAASPTTRITIGHTGFS

SEQ ID NO: 460 - protein, 358 aa, Oryza sativa
MDPAAAGIVKEEMLESQQQQRQEDGGAAPRPMEGLHEVGPPPFLTKTYDLVEDPATDGVVSWSRAGNSFVVWDPHVFADLLLPRLFKHNNFSSFVRQLNTYGFRKVDPDRWEFANEGFLRGQRHLLKTIKRRKPPSNAPPSQQQSLTSCLEVGEFGFEEEIDRLKRDKNILITEVVKLRQEQQATKDHVKAMEDRLRAAEQKQVQMMGFLARAMRNPEFFQQLAQQKEKRKELEDAISKKRRRPIDNVPFYDPGETSQTEQLDSPYLFDSGVLNELSEPGIPELENLAVNIQDLGKGKVDEERQNQTNGQAELGDDFWAELLVEDFTGKEEQSELDGKIDGIDELAQQLGYLSSTSPK

SEQ ID NO: 461 - protein, 395 aa, Oryza sativa
MNYNFGGNVFDQEVGVGGEGGGGGEGSGCPWARPCDGCRAAPSVVYCRADAAYLCASCDARVHAANRVASRHERVRVCEACERAPAALACRADAAALCVACDVQVHSANPLPAITIPATSVLAEAVVATATVLGDKDEEVDSWLLLSKDSDNNNNNNNNNDNDNNDNNNSNSSNNGMYFGEVDEYFDLVGYNSYYDNRIENNQDRQYGMHEQQEQQQQQQEMQKEFAEKEGSECVVPSQITMLSEQQHSGYGVVGADQAASMTAGVSAYTDSISNSISFSSMEAGIVPDSTVIDMPNSRILTPAGAINLFSGPSLQMSLHFSSMDREARVLRYREKKKARKFEKTIRYETRKAYAEARPRIKGRFAKRSDVQIEVDQMFSTAALSDGSYGTVPWF

SEQ ID NO: 462 - protein, 233 aa, Oryza sativa
MVRGRTELKRIENPTSRQVTFSKRRNGLLKKAFELSVLCDAEVALIVFSPRGRLYEFASAPSLQKTIDRYKAYTKDHVNNKTIQQDIQQVKDDTLGLAKKLEALDESRRKILGENLEGFSIEELRGLEMKLEKSLHKIRLKKTELLEQQIAKLKEKERTLLKDNENLRGKHRNLEAAALVANHMTTTTAPAAWPRDVPMTSSTAGAADAMDVETDLYIGLPGTERSSNRSETG

SEQ ID NO: 463 - protein, 699 aa, Oryza sativa
MGIDLNTVEEEAEEGAAAAVCGELWHACAGPGVALPRRGSALVYLPQAHLAADGGGGEVPPAGAAAVPPHVACRVVGVELRADAATDEVYARLALVAEGEMLQRNFREGGGEDGAGEMEGCDAEKKPRMPHMFCKTLTASDTSTHGGFSVPRRAAEDCFPPLVIHLKEKLVTFNDYKTVRPSQELIAVDLHGTQWKFRHIYRGQPRRHLLTIGWSSFVNRKKLVSGDAVLFLRGDDGQLRLGVRRAVQLRNEALFEPVNSSDSKLRILSSVASSLENKSVFHICFNPRSGASEFIVPYWRLLKSLNHPFSIGMRFRVCYESEDANERSAGLISGISEVDPIRWPGSRWKCLLVRWDDSTDSSHQNRVSPWEIERVGGSVSVTHSLSSGSKRTKLHFPQGSLDTPFLNGNGHPDSMGTENFHRVLQGQEFRGSRSHGVVCSESPGVPNFQSPDNRRFSADMRGYMMPASGPPQRNTEFTYQPIGFSESLGFPEVLQGQEMSQVVPLFRGATFGARTQNDRVVSANSVHRSAAQSGLLASTLGHPISQFTLSSSKVSSPSSVLMFNQATAPNHETVSGTNNKGMHVSQFASQEMLSETVTWPGTQRQTPSEITSNQFALARIPAPPSGAESGLPKRDAGRSSCRLFGFSLTGNMLGEDGEGLDDGAIEAGCENPPVLELFGHSHSTPGALHALCAAAPLGM

SEQ ID NO: 464 - protein, 310 aa, Oryza sativa
MDAEMAMGESFAYYWETQRYLESEELDSMYLPTQDDSNYESSSPDGSHSSSAPAPAAVGGDAAAAVAGSGGGMTTMMMGGGGGGGDDAGGANKNILMERDRRRKLNEKLYALRSVVPNITKMDKASIIKDAIEYIQRLQAEEQQMLREVAALESAAAASAAPAAANPFAGLGADEEHEYGHHHPSSSSERTKKVKRALSVSSISDALLAAAAPAPPVEIQELRVSEVGDRVLVVSVTCSKRRDAMARVCRALEELRLRVITANITSVAGCLMHTLFVEVDHMDSVQMKQMVEAALSQLVATGSPLSSMSY

SEQ ID NO: 465 - protein, 232 aa, Oryza sativa
MSCNGCRVLRKGCSDACVLRPSIEWIDGAQPQANATVFVAKFFGRAGLVASLAAVPLHHRPALFRSLLYEACGRTINPVSGAIGLMWTGNWDLCQAAADAVLRGDSLRALSAVPAAFTDRDMAGLYGNVGAAAGTSSSSPDNDNSSASAAPRRKRPRNNGAGAGVGQQQLPHAVAAVLQSCELDLCLTPVSPPAVQLVGGGGGASDEHSTTTCEEASDGDGAGAPTLLNLFS

SEQ ID NO: 466 - protein, 508 aa, Oryza sativa
MGLQGNKATHDFLSLYAAAATATDYSPLPRHPDSKPSAPAPPPAQDFFLKTHDFLPQVEKRADQTPPPPPPPPPHAAVTAEKQLLHQHALAAAGAFTINHAVAAAATAVKQEPPFAPWCQPVAAVDPRGHQWSLPFAARAVAVASSRPQQQQQQPPPPERKGGGGFMDAGSRSSGGAGFDDDDGHAARREVSSSLKELTVRVEGKGGSCSGSAGTDQMPNTPRSKHSATEQRRRSKINDRFQLLRDLLPHNDQKRDKASFLLEVIEYIRFLQEKVQKYEVSYPEWNQENAKVVPWTNIYFRSSWKNAQNKGQVPADHSPDPPELLKNGSPYMFPFTGNSDNNNAVETAAASGAQDQAETDPMSRVSYRSVDTPSPNNVADKVTSQPHAQLVRPSPAENHTVNCDKLNNSDLAIDEGTISLSSQYSQELLNKLNHALENSGIDLSQASISVQINLGKRAMKRSTPAATSTSKELTDPASNSQAMGRQLRLGDGAEEHRQASKRHKSDNS

SEQ ID NO: 467 - protein, 261 aa, Oryza sativa
MADLTEHPSPTAPPQVQTAGLPAAASPGPASPHSPSEQGDKTAPGAATASTMTTASSGEPSPRSSGKHAFYRGIRCRSGKWVSEIREPRKARRIWLGTYPTAEMAAAAYDVAARALRGADAVLNFPGATASRPVPASASPADIRAAAAAAAAAAAHLERPHGPTGTAYPATAAAEHHQQQQQQQYGSGSPAADDVSGYPPMEGGIGNDDFMDEEAIFELPQLLRNMAAGMMMSPPRLSPTTSDVSPEPSEAGESLWSYRDP

SEQ ID NO: 468 - protein, 81 aa, Medicago truncatula
MASSSLSKHKPCDSIWTPKQNKLFEKALAKFDKDTPDRWQNVAKAVGGKSVEEVKRHYELLLEDLKHIESGHVPIPNYKST

SEQ ID NO: 469 - protein, 91 aa, Medicago truncatula
MASSSNWTTKQNKRFENALAMLDKDTPDLWQKVARAVGGKTVEEVKRHYEDLVEDVRQIEEGHVPLPNYTNNVGYSYIMDQDKRMKALSLH

SEQ ID NO: 470 - protein, 93 aa, Medicago truncatula
MSSSSAWTTKQNKRFENALAIYDKDTPDRWQKLARAVGGKTVEEVKRHYEMLVEDLKQIEEGHVPLPKYRNAATIKGYNYSDEEQRLKYLSLQ

SEQ ID NO: 471 - protein, 412 aa, Medicago truncatula
MDRVFSVDEIPDHLWSPQIHVSGSAGDESSKMSRSASEWAFQRFLQEAASPSPSSSSVADNTGFADAAAKDGAVLPNGPPPVAVDSDEYRAFLKSKLNLACAAVAMTRGSLTKSQDLATFPENGPQSSNATQVGSQPISEGSGPSGNDPPILQDKDAKVPPAVPSIPHVQKKTIVAIRPSTSGSSREQSDDDEAEGETYMIDSTDPTDVKRVRRMLSNRESARRSRRRKQAHLTELETQVSQLRGENSTLVKRLTDVNQKYTDSAVDNRVLKADVETLRAKVKMAEETVKRVTGLNPLFHVMPDMSSMPAFDGSPSDNLADAAVPVQDDPHHHFYQPTSINPMPCHDMRVSNGLGEISSIENVQPNNAAVVGGNKMGQTAPPLHRVASLEHLQKRIRGGGVDSCGPPSNGEQ

SEQ ID NO: 472 - protein, 417 aa, Medicago truncatula
MGCVVPAELSLDLRPTFVPKTIANFLFHLSTIQTTSDKLSKLHDFLSRLEDELNKIDAFKRELPLSMLLLNDAILVLKEELEKCTSKNSVPVLEEFIPLKKEIDQSEENKNNDRDKNNNNECSKDKKNWMSSVQLWNNNTTTSNNNVSDHHHHHKLNKLETTKKREEGQSVTVAEDLFQSCSSNRNGGSAFMPFSAYSSVPVTTVTLSAPKEEKEEPVRNRLSFLTPEVKSLREGFGSRGSRSSSNRAVSSSSPPTVQPSLRAAPLQPQQTSRKQRRCWSPELHRRFVNALQKLGGSQAATPKQIRELMQVDGLTNDEVKSHLQKYRLHTRRVPAASGTDQSVVVLGGLWMPQEHYNDSSKGSSTASGSPQSPLHLATGSRGGTSPTEGDSMEDDDDEKSESYSWKSHIHRHGKVGV

SEQ ID NO: 473 - protein, 290 aa, Medicago truncatula
MASKLCDSCKSATATLYCRPDSAFLCGACDSKVHAANKLASRHPRVTLCEVCEQAPAHVTCKADAASLCITCDRDIHTANPLAARHERVPVTPFFESNTSHSVKSLNNNNNNYDAVKDEAEAASWLISDPKADLNSSPYLFSDSEAIPFMDLDYGVIEHKNDGVVPVHGNFDPFVSAYKNNNVHLHTELETPSQSQISQSVSSSSMDVGVVPDANTVPEISNCGYGTVAVDREARVMRYREKRKNRRFEKTIRYASRKAYAETRPRIKGRFAKRTDAVDSISGYGVVPTC

SEQ ID NO: 474 - protein, 412 aa, Medicago truncatula; identical to SEQ ID NO: 471

SEQ ID NO: 475 - protein, 198 aa, Medicago truncatula
MYTSNNGEGRLAASCPKKPAGRKKFKETRHPVYRGVRKRNLDKWVCEMREPNKKTRIWLGTFATAEMAARAHDVAAIALRGRYACLNFADSAWKLPIPASAEAKDIQRAAGEAAEAFRPDKTLMTTGIDTVVAVVVAVEEEEEVLNMFCVEVEKEEEVLNMQELWKNMALMSPTHSFEHEYEDFDVQFQDEEVSLWNF

SEQ ID NO: 476 - protein, 241 aa, Medicago truncatula
MEYSQYSSYSAEAGEEETYTTSSISSMRKKKNKNTKRFTDEQIKSLETMFETETRLEPRKKLQLARELGLQPRQVAIWFQNKRARWKSKQLEREYNKLQNSYNNLASKFESMKKERQTLLIQLQKLNDLIQKPIEQSQSSSQVKEAKSMESASENGGRNKCEAEVKPSPSMERSEHVLDVLSDDDTSIKVEYFGLEDETGLMNFAEHADGSLTSPEDWSAFESNDLLGQSSCDYQWWDFWS

SEQ ID NO: 477 - protein, 345 aa, Medicago truncatula
MGMEQNNVIAPFIMKTYHMVNEPNTDNLIKWGPSNNSFIVLDPLEFSHSLLPLFFKHNNFSSFVRQLNTYGFRKVDPDRWEFANEWFLRGQKHLLKNIVRKKHVGGIGNGRNNNCYNNNNYFNEVKFEDLEEDEAMVTEIMKLKEEQRNLEEELQGMNKRLETTEKRPQQMMAFLCNVVEDPQILSRILNERESKKFVDKKKRRLISPVVTAAVTTSTSSESSGMAMANSVKMEFEEDEVTVGNNMMSSSTEVGFEIDYLHRVPPREVAPVGGWLGQTEFGQMVYGRDCGVSRMPELSPVPAPMTWGENRSDSSSKKGGEGNFNEMAAENSKLPPYPFSLLEGGF

SEQ ID NO: 478 - protein, 323 aa, Medicago truncatula
MEGVETGSHERNELVRARHDVSETGSKPLKNLNGQICQICGDTVGLTATGEVFVACHECSFPLCYPCYEYEWKNVIQSCPQCKTRFKSHKDDPRVKGGDDEDDVDDLRNEVKYGQGNNAKAGWQWDEDADLSSSSGHDSQLQNPHLTNGQLMSGDIPCATSDTQSVQTTSGPLGQSENVHSRAYVDPKQPGLESDEEIRRVPDMGGESAGTSASRKGTGSTAGPERVQGAGEGQKKRGRSPADKESKRLKRLLRNRVSAQQARERKKAYLSDLETRVNDLEKKNSELKEKLSTLQNENQMLRQILKNTTASRRGSNGGSNTAE

SEQ ID NO: 479 - protein, 279 aa, Medicago truncatula
MYHAKKFPEETMMLHKSQGGGGGGGEQFANGGGLNGSAVKNVQPAGGGGKQRLRWTSDLHDRFVDAITQLGGPDRATPKGVLRVMGVPGLTIYHVKSHLQKYRLAKYLPESPGDGKDSKDEKRNSGDSISGADSSPGLQINDALRMQMEVQKRLHEQLEVQKQLQMRIEAQGKYLQKIIEEQQKLGSTLAASETLPLSHDKQNQPLSEPSGSSDALADTFSPHKKQRIDEGSKDGTAPQVTIKTAQKNDCNVGPLDPNLYEDDAGYGFDLETENDDGNE

SEQ ID NO: 480 - protein, 382 aa, Medicago truncatula
MCGGAIISDFIPAAAAVGGSRRVTADILWPNLRRKPSSRKPFLLDDDFEAGFREFKDDSDFDEDEDEDDDEGLLVGVKGFTFASNKNNKSSKSFVRGSSAAKSVALNSNQQAEKDSKRKRKNQYRGIRQRPWGKWAAEIRDPRKGVRVWLGTFNTAEEAARAYDAEARRIRGNKAKVNFPEEAPVASSKRLKKNPEMQLLNDNLNSFKPNGNQMFNFSENMENYYSPMDQVEQKPLVNNQYADIGAFSGNGVQLTSADVNAYFSSEHSSNSFDYSDLCWGEQGAKTPEISSVFSAAAPMEGESQKNMLSDNTQDMLPMQNDSAKTLSEELADIESQLKFFENDNWSDASLAALLSGDTTQDGGNTMNLWNFDDLPSIAGGVF

SEQ ID NO: 481 - protein, 93 aa, Medicago truncatula; identical to SEQ ID NO: 470

SEQ ID NO: 482 - protein, 294 aa, Medicago truncatula
MQTHHQYYSFSCESASCSSSLDDEDSIFLSLAPPGHQIPPKLTPPHPTISTTIPPLHQIPISTTTSLHHHHTCAVNVALNALINPTFTSKPSHTPIIPQYWIPSPAQILVGPTQFSCTVCNKTFNRFNNMQMHMWGHGSQYRKGPESLKGPKPASSSSMLKLPCYCCAEGCRNNINYPRARPLKDFRTLQTHYKRKHGGKSFECRKCRKTFAVRGDWRTHEKNCGKLWFCICGSDFKHKRSLKDHVRAFGNGHAPHTLESLSFDGHKVNENYMEEEESGSEDDDNDSEVVFSLN

SEQ ID NO: 483 - protein, 909 aa, Medicago truncatula
MGDGAAVTSSATNTMMEAPPQDENLMDFDYMSELLLDGCWLEASADGSEFLLQSSPFSNPIFDPSFSWPVLENNEQPGNDVRHESQDVPLGTEQESRIIVNNAGSSDLQQCEFKTHLGEGVSRLWIPPTPNPGPGGSSITEKLIRALKWIKDFNRNKDMLIQIWVPVNRGDDRPILRANDLPFSLESRSLNLAKYREISVRYQFSAEVEDSKELVAGLPGRVYRDKIPEWTPDVRFFRSDEYPRVDHAQECDVHGTLAVPVFEQGSRTCLGVIEVVMTTQQSNYGRELETVCKALEVVDLSSSGHSSPQNVKACVKSYETALPEIQEVLRSACEMHKLPLAQTWVSCIQQGKDGCRHSDDNYTHCISPVEYACYVGDSSVRFFHEACMEHHLLIGQGVAGGAFMTNQPCFSTDITSLSKTDYPLSHHARLFGLRAAVAIRLRSIYSISDDYVLEFFLPVDCNDGEEQKKMLTSLSMIIQRVCRSLRVITDKELEKNNLSSNEVMAVADIGFATDAVQSGLQHKRMAVSLDGEEKFNETMSSKFSEQRRQQESLTLRGDADCGRECSPSVEGNFLSSLGVNRTGEKRRAKAEKTITLQVLRQYFAGSLKDAAKNIGVCTTTLKRICRQHGIKRWPSRKIKKVGHSLQKLQLVIDSVQGASGSFQIDSFYSKFSDLSSPNLSGSTLISTLNQVDNPVSLSIQPDPDSLSPEGASKSPSSSCSQSSYSSHSCSSLSEQQHHTNNVAAGNKDSLVGEDSVDVVLKRIRSEAELKSLIPDNKSKLMPRSQSQETLGEHPKTEYRKSLLKTTRKASQKEDAHRVKVTFGDEKTRFRLPKIWCYEDLVQEIARRFNVSEMSKFDIKYLDDDYEWVLLTCDADLEECIDVSQSSETSTIKLCLQPSSNFIRSSLEFR

SEQ ID NO: 484 - protein, 361 aa, Medicago truncatula
MNYLYPVKEEYLEIEATPSSLTYERGSDEGSTVVIPRPMEGLHEVGPPPFLTKTFDVVEDPTTSHIVSWSRGGASFVVWDPNAFSRDLLPRYFKHNNFSSFVRQLNTYGFRKIDPDKWEFANEGFLRGHKHLLANIKRRRQTSQPSTSQQQSSHSQGHCVEVGRFGLDEEIDHLRRDKQVLMMELVKLRQQQHNTRSILQAMEERLRGTEIKQQQMMAFLARAMKNPAFIQQLLQQKEKRKEIEDAITKKRRRPIEYGESSNGGDGRSSVRYGFEVSELEMLAMEMQGLGRGGGEHEEEIEVFETNEKLNKELDEGFWEELFSEKFESELDILTSQDDDDDDDEDINVLSNRFGYLGSSSK

SEQ ID NO: 485 - protein, 396 aa, Medicago truncatula
MLEQDFLTTTSATATVRSAGTWARTCDTCRSAPCAVFCRADSAYLCAACDARIHAANRVASRHERVWVCEACERAPAAFLCKADAASLCSTCDADIHSANPLASRHQRVPILPISGYLYGPPATLLGAEDEGFVRGGCEVEEEEDEGVDHDMEDENEAASWLLLNPLKNNNNNSNNNISNDHNQVANNGYLFSGEVDEYLDLVDCNSCGGDENTFTTNNTHHHDEYSQQQQQQDHYGVPQKSYVGDSVVPVQQQQVQNFQLGLEFESSKAGFSYNGGSISQSVSVSSMDVGVVPESTMTYSRPPKGTIDLFSGPSIQMSSHFSPMDREARVLRYREKKKTRKFEKTIRYASRKAYAETRPRIKGRFAKRTDVEAEVDQMFSTSLITEVGYGIVPSF

SEQ ID NO: 486 - protein, 230 aa, Medicago truncatula
MVRGKTQMKRIENATSRQVTFSKRRNGLLKKAFELSVLCDAEVALIVFSPRGRLYEFTSSSILETIERYRSHTRINNTPTTSESVENTQQLKEEAENMMKKIDLLETSKRKLLGEGLGSCSIDELQKIEQQLERSISKIRAKKTQVFREQIEQLKEKEKTLVAENAMLAEKYGNYSSQEATKDQRENIVEAETYADQSSPSSDVETELFIGLPETRTRRISPKVDNSGEL

SEQ ID NO: 487 - protein, 682 aa, Medicago truncatula
MGLIDLNTTEDDETPYSAISSSSSSSHSGISTSASAAMVVPPPLPPQGSVCLELWHACAGPLISLPKKGSIVVYVPQGHFEQAHDFPVSACNIPPHVFCRVLDVKLHAEEGSDEVYCQVLLVPENQQLEQNVREGVIDADAEEEDTEAIVKSTTPHMFCKTLTASDTSTHGGFSVPRRAAEDCFPPLDYGQQRPSQELVAKDLHGSEWRFRHIYRGQPRRHLLTTGWSAFVNKKKLVSGDAVLFLRGEDGELRLGIRRAVQLKSSGSFGGLSGMQLDPGSLMDVVNALSKRSAFSVCYNPRVSSSEFIIPVNKFLKSLDCSYSAGMRFRMRFETEDAAERRFTGLIAGISDADPVRWPGSKWKCLLVRWDDIEASRHNNRVSPWEIEPSGSASNSSNLMAASLKRTRIGFTSAKLEFPVPNGIGASDFGESLRFRKVLQGQEIMGMNTPYDSINAQSPRLYELGRCYPGSNCSGIAATGNIRMHPAASDFPSNGIGFGESFRFQKVLQGQEILLCPPYGRASFDEARGSGCIGRYDGYPMLGSRNGWPAQMHDAATHLHASVTSGQVSSPSSVLMFQQAVNPVSNSRYDNINLNQGSYISEAKSGMFAPSLSDKPILSSGLALEGTTSFGVHDFHNNNNLLDGSRSRDSVLAMRDNQDMVSCKTGCRLFGFSLTDDTHIGGG

SEQ ID NO: 488 - protein, 244 aa, Medicago truncatula
MENIGDEYKHYWETNMFFQTQELDSWGLDEALSAYYDSSSPDGAASSGVSSKNIVSERNRRKKLNERLFALRAVVPNISKMDKASIIKDAIEYIQLLHEQEKVIQAEIMELESGMPNNINPSYDFDQELPMLLRSKKKRTDQLYDSVSSRNFPIEVLELRVTYMGENTMVVSLTCNKRADTMVKLCEVFESLKLKIITANITSFSGRLLKTVFIEANEEDKDQLQTNIQTAIAALNDPLSPMSI

SEQ ID NO: 489 - protein, 194 aa, Medicago truncatula
MSCNGCRVLRKGCSEDCMLRDCLTWIQNPQAQANATVFVTKFFGRATLMSFLSPVHPNQRSCLFQSLMYEAVGRTINPVNGAVGLLWTGKWQFCQLGVEQVLRGNGGALTALPDQLLGVDHDSSSIHHQYHQQQSGLMSYSRVVKNQAEKQRAGTHESEESESSTLGSRTRTEDCSYVYANSQTQRNQLLTLFL

SEQ ID NO: 490 - protein, 570 aa, Medicago truncatula
MELPQTRSYGAGGAGRKSTHDFLSLYSNSTAEQDPRPSAQASFLKTHDFLRPLEEVEAKSSAKEEATDEISSVVEKQPPLATPASVEHLLPGGIGTYSISHINSCVNNNQRVPKPEASSLFTVHQATSADRNDDNSNCSSHTSSGFTLWEESEIRKGKTGKENNVGDKPIIGDSAAKLGQWTLKERTSQSFSNNHHGSFNSRSSSQTTGQKNQSFMEMMKSAQDCAQDEELENEGTFFLKRESSNVQRGELRVRVDGKSTDQKPNTPRSKHSATEQRRRSKINDRFQMLRELIPHSDQKRDKASFLLEVIEYIHFLQEKVHKYEGSFQGWNNEPEKLMPWRNNDRPAESFQPRSANGGSNPSPTLLFASKVDEKNITISPTTHGGIHNVESSLSTTTALKTIDHPSGITNKAFPSPISSQPNFLTSTQIGGSGGAVSQLRRRLSSDAENTNYQPSVESQTMTSTSEKLKEKELTIEGGAISISSVYSQGLLDTLTQALQSSGVDLSQASISVQIELGKQASLRPNIPMPMCVSKDDEDPSKNQRKMRSGSRVASSEKSDQALKKLKMCRS

SEQ ID NO: 491 - protein, 168 aa, Medicago truncatula
MASSSSSSSKRHPTYHGIRSRGGKWVTEIREPRKTNRIWLGTFPTPEMAAAAYDVATLALKGGDAVLNFPNSASKYPVPASNSPDDIRSAATAAAELTAAEAVNNDAGLNGRPWYETEFLDEEAIFSMPRLMVEMAEGMLLSPPRMNPPPSEYLPEYYTSGESLWSYY

SEQ ID NO: 492 - protein, 87 aa, Sorghum bicolor
MSGSRNSSRNVNIDSNWSKKENKLFEEALACYGEGTPDRWHKVARAMGGIKTADEVRRHYEILNDDVTLIESGGVPFPNYNTQGAWN

SEQ ID NO: 493 - protein, 87 aa, Sorghum bicolor
MSASRSSSPNSMSKWSPKENKMFEQALAYYGEGTPNRWDKVSSAMGGIKSAEEVRCHYEDLDYDVKMIESGHVPYPQYKTQGFWTRG

SEQ ID NO: 494 - protein, 97 aa, Sorghum bicolor
MSSSWTDSQNKLFERALAVYDKDTPDRWHNIARAVGCGKTAEDVKRHYRWLKRDVQQIESGEGGQGSHSSNSSGSGSSSNSCGRNNDDKRMRHPKPQ

SEQ ID NO: 495 - protein, 404 aa, Sorghum bicolor
MEPVFSMEEILGPFWDLPSPPPPEQQPLVIGTSSVVIDGVVTHGGNGEGSNMMDQIQNTTEWTFERLLEEELLTDTTPVANSSCPALNVDPVVEVDQGAMAPEAVSAVGDPMEYNAILKRKLEEDLMAFKMWRASTSGVNSEGSNNENGGGTIYYTKLNGEDLINNHAQNADLHVRLTTSSSSRDPSPSDEDMDGEVEILGFKMPTEERVRKRKESNRESARRSRYRKAAHLKDLEDQVDKLKAENSCLLRRLAALNQKYNDATVDNRVLKADMETLRAKVKMGEDSLKRIIEMTSLTSIPIPELPSSSDVPVHIQDNIVNYFTTTPAGDALADNSFMPMPDPLPLQLQAEEPTINGALNATEMNQIATHCAAGSQPSMQLIQETMGAMMPTSSGSTLQESELL

SEQ ID NO: 496 - protein, 342 aa, Sorghum bicolor
MGLDVGEIGMGLDLGLDLRLFAARTAGGMAAAAAKGAPAGIESCIRSLEEERKKIEVFRRELPLCARLLADVIDELKEEAAKRGGGDADAKADDGDKRKWMSTAQLWVDSEAKSDESDKEHQSEITSPEPKLLGGAPMPIRAVAAVPPLPPPFFRREDSSAGTCLSLVSPASKAPISPVATSDNASGRFCPTMPPSGSSGVTLHSQAQQQASRKARRCWSPELHRQFVAALHQLGGPQVATPKQIREVMQVDGLTNDEVKSHLQKYRLHNRRSPGVAPVSQPIMLVGGLWAPQEQSSSGSPQGPLQFSGSGVAISTATVGGDSSGSSSDEDDKSEGYSRKCV

SEQ ID NO: 497 - protein, 336 aa, Sorghum bicolor
MDTAVELELEQKPAVGYWSVVGARPCDACAAEPARLHCREDGAFLCPGCDARAHGAGSRHARVWLCEVCEHAPAAVTCRADAAALCAACDADIHSANPLARRHERLPVAPFFGALADAPQPFPSPAFAAAAAAGGQAQGEAAAADNDDDDGSNEAEAASWLLAEPDNSHEDSAAATAADTLFAESDAYLGVDLDFARCMDGVKAIGVPVAPPELDIAAGSFFYPEHSMNHSLSSSEVAVVPDAQAAGVPAVVSRGKEREARLMRYREKRKNRRFDKTIRYASRKAYAETRPRIKGRFAKRCSAEADDDALEHDEGACFSPAGSAHAASDGVVPSFC

SEQ ID NO: 498 - protein, 317 aa, Sorghum bicolor
MAGGGADDDDVVEVSCGGRGGGDPGAYAAVLKRKLDLYCAAVAKSMEAKSQESSLGYPNSQASDTSQLISQASFDGDIDGAGLVTNSNVIIEDDDFQGKPTNSGTSKELSDDDGDLEENTDPTNAKKMRRMLSNRESARRSRKRKQAHLNDLESQVSRLTSENASLLKRLADMTQKYKDASLDNKNLTVDIETMRRKVNIAEEAVRRLTGTTLMLSTAFDKPMSSTPLSSCASDAASASVAIEDSAKHFLHAPLQSGQMKLDILNAAIPLTSEGIGTKPASLQRVASLENLQKRIIGDSMHSETASTFSEPEALADR

SEQ ID NO: 499 - protein, 249 aa, Sorghum bicolor
MEYGVADDYGYGYGGYDDQQDLPSSSSVDGDEYATVLSAPPKRPAGRTKFRETRHPVYRGVRRRGPAGRWVCEVREPNKKSRIWLGTFATAEAAARAHDVAALALRGRAACLNFADSARLLRVDPATLATPDDIRRAAIQLAEDSSSSTPDASAAAAAVAVASSASVGQATPSSSAYQAGDDATGAAMYGAEYAAAAMYGAGMDFDHSYYYDGMVGGNEWQSAGSSGWHSNVDAGDDEGAGDMSLWSYY

SEQ ID NO: 500 - protein, 270 aa, Sorghum bicolor
MDRPDHHQHQFFMPAPAPATVQVPQPQQQQQQQICVPMMDEPSSFLAGMGGGGGGPSSSSARGERKRRFTEEQIRSLESMFHAHHAKLEPREKAELARELGLQPRQVAIWFQNKRARWRSKQLEHDYAVLRAKFDDLHARVESLKQDKLALTTQLNELSERLREREDRAAGGATTASSSSCNVGGAEAEAEAEDDKRNVVLGCVNNMEPPEPESCVLVGPCATPADVSVESECDDHHHHHLDYDDGFPESYCAMPELWEPWPLVEWNAVA

SEQ ID NO: 501 - protein, 267 aa, Sorghum bicolor
MDSRSMATSRAGVDAAGGVAPFVAKTYRMVDDPATDAVVAWGRDSNSFVVADPFVFSQTLLPAHFKHSNFSSFVRQLNTYGFRKVDPDRWEFAHVSFLRGQTHLLSQIVRRSSGGGNGGKRNKDDGGGGGGVDEDDAAVAMEVVRLRREQRAIEEQVAAMWRRVQETERRPKQMLAFLVKVAGDPQVLRRLVSGATAAGTDDAAAATEPQDAANVKRARLLLDAGGGGSDGAVDFSGFCSTGDEADVGFTDYLLQPPPYVFPVNSGY

SEQ ID NO: 502 - protein, 168 aa, Sorghum bicolor
MQEQPASSRPSSSERSSSSAHHMDMEVKEGMESDEEIRRVPELGLELPGASTSGREVGPGAAGADRALAQSSTAQASARRRVRSPADKEHKRLKRLLRNRVSAQQARERKKAYLTDLEVKVKDLEKKNSEMEERLSTLQNENQMLRQILKNTTVSRRGSGSTASGEGQ

SEQ ID NO: 503 - protein, 497 aa, Sorghum bicolor
MESVNHLQAMNSQSLLAMEQIAASDKTAHVSALSVHKLFDAKLDHHSLMDGTSASTSQSSNIKTELIRSSSLSRSLSVNLQKRSPESDPESPQSHVSHPKFSEPMFSNSSTFCTSLFSSSSTKTEPCHQMGTLPFLPHPPKCEQQVSAGQSSSSSLLLSGDTGNGLDEAEQSDDLKDFLDLSGDASDGSFQENNALAYDEQMEFQFLSEQLGIAITDNEKSPHLDDIYGTPPQLSSLPISSCSTQSIQDLGSPVKVQLSSSQSSSSSATTNKSRLRWTLELHERFLEAVKKLEGPEKATPKGVLKLMKVEGLTIYHVKSHLQKYRLAKYLPGPKEDKKASSEDKKAQTGKSGSDSSKNKNLQVAEALRMQIEVQKQLHEQLEVQRQLQLRIEEHARYLQKILEEQKAGSLSLKAPTKAQATESPESTLDEVSTTPQPSRNRNPVVDTECKSPVDTECKSPARPSKNRIPVVDTECKSPARIKRTKVQVDLENETLCS

SEQ ID NO: 504 - protein, 335 aa, Sorghum bicolor
MCGGAILAELIPPTRRVAPKPVTEGHLWPASSKKAGSGSNKRHHHEYADDDDFEAAFEEFDDDFDVHEDDEDHPDHFVFSSKSAFSPAHDGRRDARAAASQRTKRGRRHFHGIRQRPWGKWAAEIRDPHKGTRVWLGTFNTAEDAARAYDVEARRLRGSKAKVNFPAASARPRARRGKGNPRTAPKPAAQAQPALLLRGEKGLEGVAVKPETTMDMFDVGSFFDMTFPTFPAAPAAAMESSFAGSSATSETRSPGKKLRYDDGDSSEGSGCGSALELADELAFDPFMLLQMPYSGGYDSLDGLFAAEAVQQDVNNDMNGVSLWSFDEFPVDGYVF

SEQ ID NO: 505 - protein, 92 aa, Sorghum bicolor
MATMSLSSTRAQWTAKQNKLFEQALAVYDRDTPDRWHNIARAVGGGKSADEVRRYYELLVKDVEHIEAGKVPFPAYRCPAGYDADRLKHLKI

SEQ ID NO: 506 - protein, 519 aa, Sorghum bicolor
MEGRMTSLEAAMKASSSMASSMARNADPDHQTLRSNSVEQFYFPRPGQSLPGIPPFFGPPSSSLYPPNDNEAKFGSQFESNPSQNTDWDPQAIVSNLTFLEQKIKQVKDIVQSMNNRENQVAGGSSELAAKQQLITADLTSIIIQLISTAGSLLPSMKNPLLSSNPAVRQLGNTLGSPMGFGMNANQRPSVDSKTDIPDTGKTSDYDELMNSLNTAQDERDELIKCPNLCGGEGSEPTPMEDHDVKESDDGGEGENLPPGSYVVLQLEKEEILAPHTHFCLICGKGFKRDANLRMHMRGHGDEYKTPAALAKPTKDSGADHAPVTRYSCPFVGCKRNKEHKKFQPLKTILCVKNHYKRSHCDKSYTCSRCNTKKFSVIADLKTHEKHCGRDKWLCSCGTTFSRKDKLFGHVALFQGHTPALPMEDVKVSEASELPQDSEPTNEMARSMVYSFPSSSSDGISNLDMKMADDVRGYFSPLNFDPCFGALDDFTRPGFDISENPFSFLPSGSCSYGQQNGDS

SEQ ID NO: 507 - protein, 857 aa, Sorghum bicolor
MEEGGDPQPQLPSISVARTTSEGAGAAVDLDLLEQLLSGDNGWLEVVSRSPNSVAFSPPSAFFSADATATTVTTTTAAPTANASWWIQTGGASPSSVRERFSQALSYIRDTQSDGDVLVQLWVPVNRDDGKLVLTTSGQPFTLDHRSDSLIRFRDVSTKYQFSADVNSGDTPGLPGRVFIGRLPEWSPDIRYFTSYEYPRVRDAQYLDVHGTMGLPVFEKGSYNCLGVIELIMTRQKLNFTSELNTICSALQAVNLRSTEVSSIPRIKFSTASYKDALPEILEVLRAACLTHKLPLAQTWVTCAQQGKRGSRHSDENYRYCISTIDEACFVNEAEMRGFHEACSEHHLLRGEGVAGKAFTTNQPCFLPDIGSSTKLEYPLSHHAKIFKLKGAVAIRLRCTRTGTADFVLEFFLPTDCEALEEQKTVLDSLSSTMRGVCQTLRVVTDREMEDEAVLEMNELNSFTPQGKDKVEELSFGGKSADRRGEASWTSLAGTSQQESELAALRMHGMFSPGGQGPSLSGVQATAEGSKAKRRTKAEKTVSLQVLRQYFAGSLKDAARSLGVCPTTLKRICRQHGITRWPSRKIKKVDHSLRKLQQIIDSVHGAETAFQLNTLYKDLTNTSISSDNNLSGSVMVPPTNQSNLTDFNKHQPHKSSSNVPSTSHSHSSCSHSSKSSPSCSGGATKHAQQGIIDLIKSKNPVKDSSIQTLQTENPSLYEHFSVHEAPIDLLQDVTEKANGGHHSSPSPSSHNPKQNTDANMRVKATFGSEKVRFRLNPECNFQELKHEIAKRLSIVDTNPLVLKYLDDDSEWVLMTCDADLQECLHVYKLADIQTIKISVHLAISPATRVTTGHTGLS

SEQ ID NO: 508 - protein, 362 aa, Sorghum bicolor
MDPSVAPGIVKEELLEQQQPLQDGVGDGGGAPRPMEGLHEVGPPPFLTKTFDLVEDPATDAVVSWSRAGNSFVVWDPHVFADTMLPRLFKHSNFSSFVRQLNTYGFRKVDPDRWEFANEGFLRGQRHLLKMIKRRKPPSAVPPLRQQQAPASCLEVGEFGFEEEIDRLKRDKNILITEVVKLRQEQQTTKDHVRAMEERLRVAEQKQVQMMGFLARAMRNPEFFQQLVQQQDKRKELEDAISKKRRRPIDNTPFYSTGETSQGEQLDSQFMFESDVLNGLSEPGMPELENLAVNIQELGKGSIDGEKVAQASDQSELNDDFWAELLVEDFGDKAGQSELEGRTEDVDDLAQQLGYLSNSSPK

SEQ ID NO: 509 - protein, 411 aa, Sorghum bicolor
MNYNFSSNALDEEEVAGRGGEGGSCAAAPAWARPCDGCRAAPSVVYCHADAAYLCASCDVRVHAANRVASRHERVRVCEACERAPAVLACRADAAALCVVCDAQVHSANPLAGRHQRVPVLPLPVAAIPAASVLAEAAATAVAVGDKQEEEVDSWLLLTNTKDPVSDNNNCNCSSSSNNNISSSNTSTFYADVDEYFDLVGYNSYCDNHINSNPKQYGMQERQQQQQLLLQKEFGDKEGSEHVVPASQVAMANEQQQSGYGVIGVEQAASMTAAVSAYTDSITNSISFSSSMEVGIVPDNMATTTDMPNSGILLTPAEAISLFSSGSSLQMPLHLTSMDREARVLRYKEKKKSRKFAKTIRYATRKTYAEARPRIKGRFAKRSSDMEIEVDQMFSSAALSSDGSYGTVLWF

SEQ ID NO: 510 - protein, 226 aa, Sorghum bicolor
MVRGKTELKRIENATSRQVTFSKRRNGLLKKAYELSVLCDAEVGLIVFSPRGKLYEFASAASLQKTIDRYRTYTRENVNNKTVQQDIQQVKADAVSLANRLEALEKTKRKFLGENLEECSIEELHNLEVKLAKSLHVIRGKKTQLLEQQITKLKEKERNLLKDNKELRDKQRNLQPPPEAPPVLNRCLPPWPRNLPAPPSNDDMDVETELYIGLPGRERSSNRDSG

SEQ ID NO: 511 - protein, 575 aa, Sorghum bicolor
MFGRNIHDGETEEKDGEKEDGDGEKLTSHMFCKTLTASDTSTHGGFSVPRRAAEDCFPPLDYEQLRPSQELIAKDLHGMKWRFRHIYRGQPRRHLLTTGWSSFINKKKLVSGDAVLFLRGSDGELRLGVRRAVQLKNEALLEAVNCTDSKLLMLSAVASSLDNRSIFHICFNPRIGASEFIVPYCKFLKGLNYPFSIGTRFKVGCKNEDANERSFGLISGISEVDPIRWPGSKWKSLLVKWDGDTKYSHQNRVSPWDIERVGSSVSVTHCLSSCVSKRMKLCFPQGNLDAPILDGNGRPDSVGTEGFHQVLQGQELVRVHGAACSHSSDTPRCQGSYGRRFSADVWNCKMNDGHLNTTGFAYQPLGFSESVKFSEVLQGQEMSQVAAPSFMRDAFSAGTQNGRVRSFDYVQRSAATQGYALQQFNLPATEVHSPSSVLMFNQTMVPQPELDGLTNREEAYGSGYSSIAIQREAEPWPSTQQQRVRENGSEPLDTTEASAPARIAKSGSVDRGVGGSSCKLFGFSLTEKILGTEGVGGKEGNYEADRQTPRVLDLLGHGHSTPGALHALCAAPLGI

SEQ ID NO: 512 - protein, 282 aa, Sorghum bicolor
MDLTMGDSFACFWDCLDDSEGMQSLYIGPDGDTAVSGGGVQLQVHDGYSSAPDAAGSNFSAGAEREGSRPCNMVTVMERRRRRRLNDRLYALRSVVPNITKMDKASIIKDAIEYVLQLQQLERQLLAEVALLDTAANAHHLPAGCANTPSTEDGFAGHAAVSVSPTKKMKRNPSFSSHHSRSSSPPVDALEVRVSGAGDKVLVVSVACTHRRDAVAKVCRALDGLRLRVIAANVTAASGTVMHTALVQKEEMHQTEMKEMIETAISQLDDIVGSPLMSSTSY

SEQ ID NO: 513 - protein, 247 aa, Sorghum bicolor
MSCNGCRVLRKGCSDACVLRPSIEWIHGAQPQANATVFVAKFFGRAGLVASLAAVPLHHRPALFRSLLYEACGRTINPVSGAIGLMWTGNWDLCQAAADAVLRGDSLRALSTVPAAFTERDMDGLYGDVVVGLATGTASSSSPDENNSSSAPPSRKRRNVVVNGAGVVVRPTGCHQQQQPAGLLQSCELDLCLTPALSPPPLAGGLLLGGGASDEYSATTTCEDHQPVTGGDHAEARTTPALLNLFN

SEQ ID NO: 514 - protein, 495 aa, Sorghum bicolor
MGLQGDKATHDFLSLYTAAKDAALPLLHESKLPPPPTTTTSHQGLFLKTHDLLQPLERPPPPQAPAEKPLHQHLLPGGIGTFSISPGPRGRGAAAVVKQEQQTPFALWGQPDPRGHPWSLPFAARCVAVASARPQQPQPQQQRPPERKACGGFMDAGSRSSGGAGFDDDDGLAARREVSSSLKDHRVEAKGGSCSGSAGTDQLPNTPRSKHSATEQRRRSKINDRFQILREILPQNDQKRDKASFLLEVIEYIRFLQEKVEKHEASQPEWNQENAKIMPWSNIYFRSSWKNSQNKDEVNGDTTTDASLVIKNGSSPRFPFAAKPGDLNNAAAFETASGAHERVELEPKGCVPRKEDETPNNVTNNVATQQAAETQLTNPSPSDDLAGNNGMLNNPELAIDEGTISLSSQYSEGLLTTLNLALQNSGVDLSQASISVQINLGKRAIKRCNDPGPNPTSKDLMNHMSHDQEIGQQLIRSGDGARERSRATKRHRSER

SEQ ID NO: 515 - protein, 216 aa, Sorghum bicolor
MSDRGGPASPRSGKHPFYRGIRSRSGKWVSEIREPRKTRRIWLGTFPTAEMAAVAYDVAARALRGADAALNFPHLAASRPAPASTSADDIRAAAAEAAASLLLQQEQQQQPADHHQPPARGGAPGRGIAPAEAGAAQQQTGGSSAAAWAQQEGGSGAGNPYFLDEEALFETPQYLRNMAAGMMMSPPRFGRNSSDDSPDHPSSSDAGDSLWSYRDP

SEQ ID NO: 516 - protein, 88 aa, Triticum aestivum
MSSSGSRSASRGGANPEWSKKENKLFEDALAYYGEGTPDRWLKVSRAMGGTKTADEVRRHYEILDGDIKLIESGRVPFPNYNTQGAWN

SEQ ID NO: 517 - protein, 88 aa, Triticum aestivum
MSSGSSSRSTSPSSDSEWSKKENKMFEEALAYYGEGAPNLWDKVASAMGGTKSAEEVRRHFQILIDDVNNIEYGRIPFPKYKTQGFWT

SEQ ID NO: 518 - protein, 97 aa, Triticum aestivum
MSSSWTAKQNKIFETALATYDEDTPDRWQKVARAVGDGKSVDEVKRHYEELLKDLHHIEYAGGRRGSLYNISGASSSNGNSWGSANEDHRRRYLNPQ

SEQ ID NO: 519 - protein, 299 aa, Triticum aestivum
MLKQKLEKDLAAVAMWRASGAMPPERFAANPSLPNADVQHIGTINPIGGNVVPVQNKLAGGASGVLGPQLVQNADALVKQAASSSSREQSEDDDMEGEDEITGNGAPTDQRLRRRKQSNRESARRSRSRKAAHLNELEAQVSQLRVENSSLLRRLADVNQKYNGAAVDNRVLKADVETLRAKVKMAEDSVKRVTGMSALFPAGSDMSSLSMPFTGSPSEATSDAAVPDDLSAYFSTSEAGGNNGYMPEMASSAQEDDNFLNEAMDTGKMGRPDSLHRVASLEHLQKRMCGGPASSGSTS

SEQ ID NO: 520 - protein, 336 aa, Triticum aestivum
MGLDVGEIGMPLDLGLDLKLFVAKTAGRLAKEAPAVDACIRGLEEERRKIEVFRRELPLCARLLADVIEFMKEEAAKRSERRDADDNDKRKWMSTAQLWVDTRATDAADPVVQKEQKKESSLSKPMLLGGAIGAPMAVSCRAMPPPAAPQYFGRDDKIVGSQGLLALPMISPAANRQFSPPADDRHQAFAAKFAAPMPPPGPGLQTHDQQSRKTRRCWSPELHRHFVAALHQLGGPQVATPKQIREVMKVDGLTNDEVKSHLQKYRLHNQRSPSSSSASHPIMLVGDLWAHQEQSSSQSRSPEGPLQLSVSGVAVSALTVSDSSEEDDRSVGYSRR

SEQ ID NO: 521 - protein, 119 aa, Triticum aestivum
MDDIKAISVQLNGQPEIDLNGGNKGFYSDHSMNHSVSSSEAAVVPDAAAAPVVSRGREREARLMRYREKRKSRRFEKTIRYASRKAYAETRPRVKGRFAKRTGTADADGLEEHEEMYSS

SEQ ID NO: 522 - protein, 144 aa, Triticum aestivum
MTQKYKEASLGNRNLTVDIETMRRKVNIAEEAVRRVTGASLMFSTTSNNVPLSSCVSVAASADAVPTEENMSHFLQGLLEDNLIKHDLPEVATPLPNGEEMTSRPAPLQRVASLENLQKRIHRDSVHTEDTSSFPDHEVPANGK

SEQ ID NO: 523 - protein, 244 aa, Triticum aestivum
MDMGMDLSSSSPSSSVSSTPEHASGRASPAKRPTGRTKFRETRHPVYRGVRRRGNAGRWVCEVRVPGKRGARLWLGTYLTAEAAARANDAAMLALGGRSARCLNFADSAWLLAVPSALSNLADVRRAALQAVADFQRREAANGLIARTVAKEAPSSAPAQSSSESDSADSSETSEASADGEFEVLATMDIDMFSRLDLFPEMDLGSYYVSLAEALLMDPPSTAAIMDAYWDNGDGGADVALWSY

SEQ ID NO: 524 - protein, 259 aa, Triticum aestivum
MDYHQQHQQQHQFLMPPPASLPAQQQQLCAPMMGIDMDMDMDEQLCFMGRGGVGRGAERKRRFTEEQIRSLESMFHAHHAKLEPREKAELARELGLQPRQVAIWFQNKRARWRSKQLEHDFAALRADYDALHSRVESLKQEKLALAAQLHELSERLRQRDGGSGGAATATASSSSCNGGGQELDDDKRNVVAGCVDVEPPESCVLGGTTCATPADVSVSVESECDDHLHYDGAVFPESFCATPELWEPWPWPPVEWNAV

SEQ ID NO: 525 - protein, 280 aa, Triticum aestivum
MSGGGMDSSSSSSSGTGGSGAAPFVAKTYGMVDDRATDAVVAWGPAGNSFVVADPFAFSRALLPAHFKHANFSSFVRQLNTYGFRKVDPDRWEFAHASFLRGQTHLLPRIVRRQSSKRGKDSREEEEEESSSAALAMEVVRLRKEQRATEERVAEMWRRVQETERRPKQMLAFLLKVVGDPDVLRRLAGGPGSGGGPDEGAEEGKEGAEEVKRPRLLLDGDGAGVDGGLLYHHSGNLMNLGEALVPEEPSVDMYYAGGDGFGGVQADGGPPYAFHMDTGY

SEQ ID NO: 526 - protein, 164 aa, Triticum aestivum
MQDQTATTTSSPPSSSDRSSSSNSKEGMDSDDDIGRVPEFRLDQGGPSTSGREAASAGTSSELAQSATAAAQASSRRRGRSPADKEHRRLKRLLRNRVSAQQARERKKAYMGELEVKVKDLETRNSELEERLSTLQNENQMLKQILKNTTGNRRGPGSGAGGDS

SEQ ID NO: 527 - protein, 455 aa, Triticum aestivum
MSSHGVVAVKPIATPDKTTHSYACGSTQSSVHKLLDSKLDHLGLLDDNLSSTSQSSDIKTELIRTSSLGRSSLPFNLQRRSPEPDPESPLSHVSHPNFSEPMASNSSTFCTSLFSSSLTNSAPCRRMGALPFLPHPPKYEQQVLPGQSSTSSLQLSGDTGNVHDEAEQADDIKDFLNLSAGDASDGSFHGENQAFAFAEAEQMEFQFLSEQLGIAITDNEESPQLDDIYDTPPPQMSSLPVSSCSNQILQNPGSPAKLPLSSSRSSSGSAAANKSRLRWTLELHERFVEAVNKLEGPDKATPKGVLKLMKVEGLTIYHVKSHLQKYRHAKYIPEIKEEKKASSDLKKVQPGSSGSDPFKNKNLAEALRMQMEVQKQLHEQLEVQRQLQLRIEEHAKYLQRILEEQQKVGSGSSLSLKTPTEPSESTSKDRTEPEEATTSSPQTSKNSEPVVASGC

SEQ ID NO: 528 - protein, 314 aa, Triticum aestivum
MCGGAILAELIPPSAGRASKQVAAGRASPKKAGKSKGHRYGSVADVDDFEAAFENFDDDLDLQAEEDGDEHVVFASKPAFSPAYDDGRAAQAASKKKSVRPLHGIRQRPWGKWAAEIRDPHKGTRVWLGTFDTADDAARAYDVAARRLRGSKAKVNFPDAARAGARPRRASRRTAQKPQRPPARTTAYSATAAPRARPEQDAMMVKPERMEFSDVDAFVDLTAAVAVLPPVTASSFADKMPRVDEDSSEGSGGGSMLGFADDLGFDPFMMLQYESMDSLFAGDAVIQDARGVDGGMDGVSLWSFEEFPMDSAIF

SEQ ID NO: 529 - protein, 96 aa, Triticum aestivum
MASLSMSAGWTPKQNKLFEQALAVHDRDTPDRWHNIARAVGGGKSADDVRRYYELLVHDIARIEAGKVPFPAYRPPCPGTGHNASYEADRLKHLKI

SEQ ID NO: 530 - protein, 416 aa, Triticum aestivum
MMCSSDHFDGNNHLYLQPNHQRGTGGMEACDLERIGHEQSRHGQEAGEHRSDPSAALTTYLTFLEHKIGHLRGILCSTPRHQQQQRAIVSAELRCIIVQLVSIANDLASDSGTGNGVGAADAFTFERCEERSPSLSNATHDDSDDHADAGGEEEEEGDGPYEVVQIEKEEILAPHAHCCKVCGKGFKRDANLRMHMRGHGDQYKAPGALARPGSPTPANGRRFFYSCPYAGCKRNREHRDFQPLKTPVCVKNHYRRSHCDKSHVCRRCGVKRFSVLADLRTHEKHCGRDRWVCSCGVSFSRKDKLFAHVAIFDGGHTPALPPSDDEATGHCTAATATTTAIDSIVPGSTQPLPAGSEALNVVDQSFSGQMLDGLSCSGAKGGIDDVRAKLSSPVGIDFCDFDGFDLLGAVAMDFNF

SEQ ID NO: 531 - protein, 898 aa, Triticum aestivum
MMCSPLPPSPCNPNTNASTSDTKIFPRPPPPSNTWFTQDALLGFEQERRSSEGSFTCMEGGDAPPGISMGRAMSSEGDLDLLEQLLSGDNAWLEVAPNTSRSPNFFASPSTFLSDATTTTTMPASTNNALWIQSGSSTVRERLDQALAYIKEMQRDVGMLVQLWVPIKSGEGQLVLSTSGQPFTLDETSERLRQFREVSTQYQFSADVASESSPIGLPGRVFIGKLPEWSPDVRYFTSYEYPRVNHAQYLDVHGTMGLPVFEKGSYSCLGVMELIMTRQKLNFTSEINNICSALQAVNLRSTEVSNIPRATKFNSASYKDALPEILEVLRAACVTHKLPLAQTWVTCAQQGKRGSRHSDENYRHCISTIDAACYVNDPQMQNFHESCSDHHLLHEQGVVGKAFTTNQPCFLPDIGSSTKMEYPLSHHAKIFNLKGAVAIRLRCTRTGTADFVLEFFLPTDCEALEEQKAVLDSLSGTMRSACRTLRVVTDKEMADEAMLEVNELNSFGPQGKNKVEELSFGDQATEHREEASWTSLAGTSKESDLAELSIHGMLSPVGQGLSPAGAQTSAQGSKGKRRTKTEKTVSLPVLRQYFAGSLKDAARSLGVCPTTLKRICRQHGINRWPSRKIKKVDHSLRKLQQIIDSVHGGETAFQLNTLYKDLTNTSVSSDNNLSGSVTVPPHKQSNLTDFEGHRHHRLSSIVPSTSHSHSSCSQSSDSSPSSCSGGSTKHPPQAGVDFLMSGNPVNHSPVQTLQTENASIRGHFPVQEAPDLLHNLNQQALGGQHSSRSPSPPKQNADAGMRIKATFGSEKVRFRLKPECSFQELKQEMARRLSIVDTSFLIVKYLDDDLEWVLMTCDADLQECLHVYKLANLQTVKISVHLAPIPEARVTIGHTGLS

SEQ ID NO: 532 - protein, 368 aa, Triticum aestivum
MDAMPPEGIVKEEEVLLHEERTHPAAAPPQQRQDGALPRPMEGLHEAGPPPFLTKTYDLVEDPATDQVVSWGRAGNTFVVWDPHVFAEALLPRLFKHSNFSSFVRQLNTYGFRKVDPDRWEFANEGFLRGQRHLLKTIKRRKPPSNAPSSQQQALTSCLEVGEFGFEEEIDRLKRDKNLLITEVVKLRQEQQATKDNVQAMEGRLRAAEQRQAQMMGFLARAMRNPHFFQQLVQKQDKRKELEDAISKKRRRPIDNAPFYGSGATTSQSEQLDSQFLFDSGVLSEPGMNGMENLAQNIQELGQGKTDEEKKDEANGQLDINSDFWAELFSDDFGDEDGSGLSELEGRRPEDIDELGQQLGYLSSTSPQ

SEQ ID NO: 533 - protein, 385 aa, Triticum aestivum
MNCVSNGTVYEEAVGREGSWARLCDGCCAVPSVVYCRADSAYLCASCDAQIHAANRVASRHERVLLSEAYKHAPVVLECHADAAALCAAYEAQVHYTNLLATMHQRVPVVSHPVAAIPAASLFAEAAATAPVLGSKEEDASWLLPSKDSDNHNHSGNHSSSSSSSSSRYFGEVDQYFDLVGYNSYYDSHMNNQEQYVMQEQQHLQQMQKEYAEQQMQKEYVEKEGSECIVPSQSAIVSRPHQSGYAPLVGAEQAASVTAGVSAYTDSVNNSISFSMEAGIVPDNTVQSSILRPAGAIGLFSSPSLQTPIHFSSKEREARVLRYKEKKKSRKFEKTTRYATRKAYAEARPRIKGRFAKRSDADMEADQTFSTAALSDSSYSTVPWF

SEQ ID NO: 534 - protein, 182 aa, Triticum aestivum
VDGDRSSTPLLIRLQKSIDRYKAYTKDNNVNNKTVQPDIQQVKADTVSLAKKLEALEVSKLKILGENLGGCSAEELNCLEVNIEKSLRTIRGKKTQVLEQQIANLKEKERMLLKDNEDLRGKQRDLEASLVVPALNCVTPLQPRGQLAPEQEPVPSDEDVETELYIGLPGVRCSNRRSGQAK

SEQ ID NO: 535 - protein, 441 aa, Triticum aestivum
CAVILSEIPGQPRRHLLTTGWSSFVNKKKLVSGDAVLFLRGDDGELRLGVRRAVQLRNEALFKAVNSNESKLHTLSAVASSLENRSIFHVCFDPRSGASEFIVPYWRFSKSLNHSFSIGMRFKDSNESDDANERSTGLISGISEVDPIRWPGSKWRCLQVRWDDGNHCNHQRRVSPWEIERVGGSISVTDCLSASSSKRAKLYFPQGNLDAPVTDGNGYPDSVETGSFHRVLQGQELLMGSRAHGAARSQSPDVAKFRTPDHQRFSANARSYIPQQSPVEFPYHSSGFGESLRFPEVLQGQEMSQALRFYQGTAFDARAQHGGVVGPFGYAQRSAAPGGLSPAAQGYALGQFTPSAAAAAKVSSPSSVLMFNQATVPQFDLEGRASSYRGAYGGQCPPAMEMARETEEAWPCAQRRTPSVTGTGPPETSSGGATAGCLGSP

SEQ ID NO: 536 - protein, 278 aa, Triticum aestivum
MDPDMGENFAYYWETQRYLESEELVDSIFVGATEDAISYYDSSSPDGSHSSSTPMGAAMPGAGMGMGGTGANKNILMERDRRRKLNEKLYTLRSVVPNITKMDKASIIKDAIEYIQQLQAEERQMEAEVSALESATGAEDDCDGGLSVDQVSSAQRKKVKRALSVSSMNDALLAAAATVASPPVEVLELRVSEVSEKVLVVSVTCSKQRDAMTKVCRALEELRLRVITANITSVSGCLMHTLFVEVDEMDRFEMKETVEAALSQLDSTGSPPLSSMSY

SEQ ID NO: 537 - protein, 233 aa, Triticum aestivum
MSCNGCRVLRKGCSDACVLRPSIEWIDGAQPQANATVFVAKFFGRAGLVASLAAVPLHHRPALFRSLLYEACGRTINPVSGAIGLMWTSNWDLCQAAAEAVLRGDSLRSLSAVPAAFTERDMAGLYGNVGTNTGSSSSLHSSPENSTSAPARKRSKNSPGCGAVGGQQQVKLPGPGPVLQSCELDLCLTPLSSPLAGGRRGGASDEYSTTTCCEEASGDAAEAGAPPLLNLFN

SEQ ID NO: 538 - protein, 507 aa, Triticum aestivum
MGIQGNKGTHDFLSLYAPAAAAAAKDSSLQLHDSKPPAASQGFFLKTHDFLQPLEKPAASAPSGADRQQQQPQTTKHALPGGIGTFSVTRQAPGAAGPQSAAAAAVVVVKPEPPPFVLWGQPTASQPPRAQGHHHQWTLPFAGAGQAATASRKHPAERKRRGGGGFMDSGSRSSGGAGFDDDDGLAARREVSSSLQELAVRVDAKGGSCSGSGTDQLPNTPKSKHSATEQRRRSKINDRFQILRDLLPHTDQKRDKATFLLEVIEYIRFLQEKAQKYEASFPEWNQENAKLLPWSNMYFRSSWKNAQSKGQIAEDASPDPSQFIRNGASPGFNITGKLDDNHTAVASAAISGAPDQAETDHMASVSCRSADTPTNIMNNVSPQSQPQWANPSGVDDCAVNSDVLNNQQLMIDEGTISVSSQYSQELLNTLAHALQSSGIDLSQANISVQINLGKRAVKRPTAGQSSSFKEHIDLAPTNEMMGHQQTMLGNAAEELPHAAKRYKPGNT

SEQ ID NO: 539 - protein, 92 aa, Triticum aestivum
PAAAGSALQLQQQLSGSSAAAASASGAAQQDQAGIGFNQFFLDEEALFETPQFLRNMAAGMMMSPPRLSPDSSDESPDPSEAGESLWSYRDP

SEQ ID NO: 540 - protein, 230 aa, Triticum aestivum
MSCNGCRVLRKGCSDACVLRPSIEWIDGAQPQANATVFVAKFFGRAGLVASLAAVPLHHRPALFRSLLYEACGRTINPVSGAIGLMWTSNWDLCQAAADAVLRGDSLRSLSAVPAAFTERDMAGLYGNVGTNTGSSSSLHSSPENSTSAPARKRSKNNCGAAVGQQVKLPGPGPVLQSCELDLCLTPLSSPLAGGRRGGASDEYSTTTCCEEASGDAAEAGAPPLLNLFN

SEQ ID NO: 541 - protein, 230 aa, Triticum aestivum
MSCNGCRVLRKGCSDACVLRPSIEWIDGAQPQANATVFVAKFFGRAGLVASLAAVPLHHRPALFRSLLYEACGRTINPVSGAIGLMWTSNWDLCQAAADAVLRGDSLRSLSAVPAAFTERDMAGLYGNVGTNTGSSSSLHSSPENSTSAPARKRSKNNPGCGAAGGQQVKLPGPVLPSCDLDLCLTPLSSPLAGGRRGGASDEYSTTTCCEDASGDAAEAGAPPLLNLFN

SEQ ID NO: 542 - protein, 252 aa, Camelina sativa
MSCNGCRVLRKGCSENCILRPCIQWIETADAQGHATVFVAKFFGRAGLMSFISAVPDSQRPALFQSLLYEACGRTVNPVNGAIGMLWTGNWNICQAAVETVLRGGSLRPIPELLTHGGGFAGFPSPTSEEASEICTEMLNLQQNNNDSTDRNIYHHSRFSSSRSRSTMDSSSPPRKRKRVTTSEQQPSSELDLSLIPKSTTPSSTRRRSVTPSMNSEDSVTTTTTASFCDKGDVLYGGNGGGETSKLLNLFV

SEQ ID NO: 543 - DNA, 20231 bp, Artificial Sequence
  Synthetic construct pMBXS1223
catgccaaccacagggttcccctcgggatcaaagtactttgatccaacccctccgctgctatagtgcagtcggcttctgacgttcagtgcagccgtcttctgaaaacgacatgtcgcacaagtcctaagttacgcgacaggctgccgccctgcccttttcctggcgttttcttgtcgcgtgttttagtcgcataaagtagaatacttgcgactagaaccggagacattacgccatgaacaagagcgccgccgctggcctgctgggctatgcccgcgtcagcaccgacgaccaggacttgaccaaccaacgggccgaactgcacgcggccggctgcaccaagctgttttccgagaagatcaccggcaccaggcgcgaccgcccggagctggccaggatgcttgaccacctacgccctggcgacgttgtgacagtgaccaggctagaccgcctggcccgcagcacccgcgacctactggacattgccgagcgcatccaggaggccggcgcgggcctgcgtagcctggcagagccgtgggccgacaccaccacgccggccggccgcatggtgttgaccgtgttcgccggcattgccgagttcgagcgttccctaatcatcgaccgcacccggagcgggcgcgaggccgccaaggcccgaggcgtgaagtttggcccccgccctaccctcaccccggcacagatcgcgcacgcccgcgagctgatcgaccaggaaggccgcaccgtgaaagaggcggctgcactgcttggcgtgcatcgctcgaccctgtaccgcgcacttgagcgcagcgaggaagtgacgcccaccgaggccaggcggcgcggtgccttccgtgaggacgcattgaccgaggccgacgccctggcggccgccgagaatgaacgccaagaggaacaagcatgaaaccgcaccaggacggccaggacgaaccgtttttcattaccgaagagatcgaggcggagatgatcgcggccgggtacgtgttcgagccgcccgcgcacgtctcaaccgtgcggctgcatgaaatcctggccggtttgtctgatgccaagctggcggcctggccggccagcttggccgctgaagaaaccgagcgccgccgtctaaaaaggtgatgtgtatttgagtaaaacagcttgcgtcatgcggtcgctgcgtatatgatgcgatgagtaaataaacaaatacgcaaggggaacgcatgaaggttatcgctgtacttaaccagaaaggcgggtcaggcaagacgaccatcgcaacccatctagcccgcgccctgcaactcgccggggccgatgttctgttagtcgattccgatccccagggcagtgcccgcgattgggcggccgtgcgggaagatcaaccgctaaccgttgtcggcatcgaccgcccgacgattgaccgcgacgtgaaggccatcggccggcgcgacttcgtagtgatcgacggagcgccccaggcggcggacttggctgtgtccgcgatcaaggcagccgacttcgtgctgattccggtgcagccaagcccttacgacatatgggccaccgccgacctggtggagctggttaagcagcgcattgaggtcacggatggaaggctacaagcggcctttgtcgtgtcgcgggcgatcaaaggcacgcgcatcggcggtgaggttgccgaggcgctggccgggtacgagctgcccattcttgagtcccgtatcacgcagcgcgtgagctacccaggcactgccgccgccggcacaaccgttcttgaatcagaacccgagggcgacgctgcccgcgaggtccaggcgctggccgctgaaattaaatcaaaactcatttgagttaatgaggtaaagagaaaatgagcaaaagcacaaacacgctaagtgccggccgtccgagcgcacgcagcagcaaggctgcaacgttggccagcctggcagacacgccagccatgaagcgggtcaactttcagttgccggcggaggatcacaccaagctgaagatgtacgcggtacgccaaggcaagaccattaccgagctgctatctgaatacatcgcgcagctaccagagtaaatgagcaaatgaataaatgagtagatgaattttagcggctaaaggaggcggcatggaaaatcaagaacaaccaggcaccgacgccgtggaatgccccatgtgtggaggaacgggcggttggccaggcgtaagcggctgggttgtctgccggccctgcaatggcactggaacccccaagcccgaggaatcggcgtgacggtcgcaaaccatccggcccggtacaaatcggcgcggcgctgggtgatgacctggtggagaagttgaaggccgcgcaggccgcccagcggcaacgcatcgaggcagaagcacgccccggtgaatcgtggcaagcggccgctgatcgaatccgcaaagaatcccggcaaccgccggcagccggtgcgccgtcgattaggaagccgcccaagggcgacgagcaaccagattttttcgttccgatgctctatgacgtgggcacccgcgatagtcgcagcatcatggacgtggccgttttccgtctgtcgaagcgtgaccgacgagctggcgaggtgatccgctacgagcttccagacgggcacgtagaggtttccgcagggccggccggcatggccagtgtgtgggattacgacctggtactgatggcggtttcccatctaaccgaatccatgaaccgataccgggaagggaagggagacaagcccggccgcgtgttccgtccacacgttgcggacgtactcaagttctgccggcgagccgatggcggaaagcagaaagacgacctggtagaaacctgcattcggttaaacaccacgcacgttgccatgcagcgtacgaagaaggccaagaacggccgcctggtgacggtatccgagggtgaagccttgattagccgctacaagatcgtaaagagcgaaaccgggcggccggagtacatcgagatcgagctagctgattggatgtaccgcgagatcacagaaggcaagaacccggacgtgctgacggttcaccccgattactttttgatcgatcccggcatcggccgttttctctaccgcctggcacgccgcgccgcaggcaaggcagaagccagatggttgttcaagacgatctacgaacgcagtggcagcgccggagagttcaagaagttctgtttcaccgtgcgcaagctgatcgggtcaaatgacctgccggagtacgatttgaaggaggaggcggggcaggctggcccgatcctagtcatgcgctaccgcaacctgatcgagggcgaagcatccgccggttcctaatgtacggagcagatgctagggcaaattgccctagcaggggaaaaaggtcgaaaaggtctctttcctgtggatagcacgtacattgggaacccaaagccgtacattgggaaccggaacccgtacattgggaacccaaagccgtacattgggaaccggtcacacatgtaagtgactgatataaaagagaaaaaaggcgatttttccgcctaaaactctttaaaacttattaaaactcttaaaacccgcctggcctgtgcataactgtctggccagcgcacagccgaagagctgcaaaaagcgcctacccttcggtcgctgcgctccctacgccccgccgcttcgcgtcggcctatcgcggccgctggccgctcaaaaatggctggcctacggccaggcaatctaccagggcgcggacaagccgcgccgtcgccactcgaccgccggcgcccacatcaaggcaccctgcctcgcgcgtttcggtgatgacggtgaaaacctctgacacatgcagctcccggagacggtcacagcttgtctgtaagcggatgccgggagcagacaagcccgtcagggcgcgtcagcgggtgttggcgggtgtcggggcgcagccatgacccagtcacgtagcgatagcggagtgtatactggcttaactatgcggcatcagagcagattgtactgagagtgcaccatatgcggtgtgaaataccgcacagatgcgtaaggagaaaataccgcatcaggcgctcttccgcttcctcgctcactgactcgctgcgctcggtcgttcggctgcggcgagcggtatcagctcactcaaaggcggtaatacggttatccacagaatcaggggataacgcaggaaagaacatgtgagcaaaaggccagcaaaaggccaggaaccgtaaaaaggccgcgttgctggcgtttttccataggctccgcccccctgacgagcatcacaaaaatcgacgctcaagtcagaggtggcgaaacccgacaggactataaagataccaggcgtttccccctggaagctccctcgtgcgctctcctgttccgaccctgccgcttaccggatacctgtccgcctttctcccttcgggaagcgtggcgctttctcatagctcacgctgtaggtatctcagttcggtgtaggtcgttcgctccaagctgggctgtgtgcacgaaccccccgttcagcccgaccgctgcgccttatccggtaactatcgtcttgagtccaacccggtaagacacgacttatcgccactggcagcagccactggtaacaggattagcagagcgaggtatgtaggcggtgctacagagttcttgaagtggtggcctaactacggctacactagaaggacagtatttggtatctgcgctctgctgaagccagttaccttcggaaaaagagttggtagctcttgatccggcaaacaaaccaccgctggtagcggtggtttttttgtttgcaagcagcagattacgcgcagaaaaaaaggatctcaagaagatcctttgatcttttctacggggtctgacgctcagtggaacgaaaactcacgttaagggattttggtcatgcattctaggtactaaaacaattcatccagtaaaatataatattttattttctcccaatcaggcttgatccccagtaagtcaaaaaatagctcgacatactgttcttccccgatatcctccctgatcgaccggacgcagaaggcaatgtcataccacttgtccgccctgccgcttctcccaagatcaataaagccacttactttgccatctttcacaaagatgttgctgtctcccaggtcgccgtgggaaaagacaagttcctcttcgggcttttccgtctttaaaaaatcatacagctcgcgcggatctttaaatggagtgtcttcttcccagttttcgcaatccacatcggccagatcgttattcagtaagtaatccaattcggctaagcggctgtctaagctattcgtatagggacaatccgatatgtcgatggagtgaaagagcctgatgcactccgcatacagctcgataatcttttcagggctttgttcatcttcatactcttccgagcaaaggacgccatcggcctcactcatgagcagattgctccagccatcatgccgttcaaagtgcaggacctttggaacaggcagctttccttccagccatagcatcatgtccttttcccgttccacatcataggtggtccctttataccggctgtccgtcatttttaaatataggttttcattttctcccaccagcttatataccttagcaggagacattccttccgtatcttttacgcagcggtatttttcgatcagttttttcaattccggtgatattctcattttagccatttattatttccttcctcttttctacagtatttaaagataccccaagaagctaattataacaagacgaactccaattcactgttccttgcattctaaaaccttaaataccagaaaacagctttttcaaagttgttttcaaagttggcgtataacatagtatcgacggagccgattttgaaaccgcggtgatcacaggcagcaacgctctgtcatcgttacaatcaacatgctaccctccgcgagatcatccgtgtttcaaacccggcagcttagttgccgttcttccgaatagcatcggtaacatgagcaaagtctgccgccttacaacggctctcccgctgacgccgtcccggactgatgggctgcctgtatcgagtggtgattttgtgccgagctgccggtcggggagctgttggctggctggtggcaggatatattgtggtgtaaacaaattgacgcttagacaacttaataacacattgcggacgtttttaatgtactgaattaacgccgaattaattcgggggatctggattttagtactggattttggttttaggaattagaaattttattgatagaagtattttacaaatacaaatacatactaagggtttcttatatgctcaacacatgagcgaaaccctataggaaccctaattcccttatctgggaactactcacacattattatggagaaactcgagggatcccggtcggcatctactctattcctttgccctcggacgagtgctggggcgtcggtttccactatcggcgagtacttctacacagccatcggtccagacggccgcgcttctgcgggcgatttgtgtacgcccgacagtcccggctccggatcggacgattgcgtcgcatcgaccctgcgcccaagctgcatcatcgaaattgccgtcaaccaagctctgatagagttggtcaagaccaatgcggagcatatacgcccggagccgcggcgatcctgcaagctccggatgcctccgctcgaagtagcgcgtctgctgctccatacaagccaaccacggcctccagaagaagatgttggcgacctcgtattgggaatccccgaacatcgcctcgctccagtcaatgaccgctgttatgcggccattgtccgtcaggacattgttggagccgaaatccgcgtgcacgaggtgccggacttcggggcagtcctcggcccaaagcatcagctcatcgagagcctgcgcgacggacgcactgacggtgtcgtccatcacagtttgccagtgatacacatggggatcagcaatcgcgcatatgaaatcacgccatgtagtgtattgaccgattccttgcggtccgaatgggccgaacccgctcgtctggctaagatcggccgcagcgatcgcatccatggcctccgcgaccggctgcagttatcatcatcatcatagacacacgaaataaagtaatcagattatcagttaaagctatgtaatatttacaccataaccaatcaattaaaaaatagatcagtttaaagaaagatcaaagctcaaaaaaataaaaagagaaaagggtcctaaccaagaaaatgaaggagaaaaactagaaatttacctgcagaacagcgggcagttcggtttcaggcaggtcttgcaacgtgacaccctgtgcacggcgggagatgcaataggtcaggctctcgctgaattccccaatgtcaagcacttccggaatcgggagcgcggccgatgcaaagtgccgataaacataacgatctttgtagaaaccatcggcgcagctatttacccgcaggacatatccacgccctcctacatcgaagctgaaagcacgagattcttcgccctccgagagctgcatcaggtcggagacgctgtcgaacttttcgatcagaaacttctcgacagacgtcgcggtgagttcaggctttttcatggtagaggagctcgccgcttggtatctgcattacaatgaaatgagcaaagactatgtgagtaacactggtcaacactagggagaaggcatcgagcaagatacgtatgtaaagagaagcaatatagtgtcagttggtagatactagataccatcaggaggtaaggagagcaacaaaaaggaaactctttatttttaaattttgttacaacaaacaagcagatcaatgcatcaaaatactgtcagtacttatttcttcagacaacaatatttaaaacaagtgcatctgatcttgacttatggtcacaataaaggagcagagataaacatcaaaatttcgtcatttatatttattccttcaggcgttaacaatttaacagcacacaaacaaaaacagaataggaatatctaattttggcaaataataagctctgcagacgaacaaattattatagtatcgcctataatatgaatccctatactattgacccatgtagtatgaagcctgtgcctaaattaacagcaaacttctgaatccaagtgccctataacaccaacatgtgcttaaataaataccgctaagcaccaaattacacatttctcgtattgctgtgtaggttctatcttcgtttcgtactaccatgtccctatattttgctgctacaaaggacggcaagtaatcagcacaggcagaacacgatttcagagtgtaattctagatccagctaaaccactctcagcaatcaccacacaagagagcattcagagaaacgtggcagtaacaaaggcagagggcggagtgagcgcgtaccgaagacggtagatctctcgagagagatagatttgtagagagagactggtgatttcagcgtgtcctctccaaatgaaatgaacttccttatatagaggaaggtcttgcgaaggatagtgggattgtgcgtcatcccttacgtcagtggagatatcacatcaatccacttgctttgaagacgtggttggaacgtcttctttttccacgatgctcctcgtgggtgggggtccatctttgggaccactgtcggcagaggcatcttgaacgatagcctttcctttatcgcaatgatggcatttgtaggtgccaccttccttttctactgtccttttgatgaagtgacagatagctgggcaatggaatccgaggaggtttcccgatattaccctttgttgaaaagtctcaatagccctttggtcttctgagactgtatctttgatattcttggagtagacgagagtgtcgtgctccaccatgttatcacatcaatccacttgctttgaagacgtggttggaacgtcttctttttccacgatgctcctcgtgggtgggggtccatctttgggaccactgtcggcagaggcatcttgaacgatagcctttcctttatcgcaatgatggcatttgtaggtgccaccttccttttctactgtccttttgatgaagtgacagatagctgggcaatggaatccgaggaggtttcccgatattaccctttgttgaaaagtctcaatagccctttggtcttctgagactgtatctttgatattcttggagtagacgagagtgtcgtgctccaccatgttggcaagctgctctagccaatacgcaaaccgcctctccccgcgcgttggccgattcattaatgcagctggcacgacaggtttcccgactggaaagcgggcagtgagcgcaacgcaattaatgtgagttagctcactcattaggcaccccaggctttacactttatgcttccggctcgtatgttgtgtggaattgtgagcggataacaatttcacacaggaaacagctatgaccatgattacgaattcgagctcggtacccctactccaaaaatgtcaaagatacagtctcagaagaccaaagggctattgagacttttcaacaaagggtaatttcgggaaacctcctcggattccattgcccagctatctgtcacttcatcgaaaggacagtagaaaaggaaggtggctcctacaaatgccatcattgcgataaaggaaaggctatcattcaagatgcctctgccgacagtggtcccaaagatggacccccacccacgaggagcatcgtggaaaaagaagacgttccaaccacgtcttcaaagcaagtggattgatgtgacatctccactgacgtaagggatgacgcacaatcccacccctactccaaaaatgtcaaagatacagtctcagaagaccaaagggctattgagacttttcaacaaagggtaatttcgggaaacctcctcggattccattgcccagctatctgtcacttcatcgaaaggacagtagaaaaggaaggtggctcctacaaatgccatcattgcgataaaggaaaggctatcattcaagatgcctctgccgacagtggtcccaaagatggacccccacccacgaggagcatcgtggaaaaagaagacgttccaaccacgtcttcaaagcaagtggattgatgtgacatctccactgacgtaagggatgacgcacaatcccactatccttcgcaagacccttcctctatataaggaagttcatttcatttggagaggacagcccgtcgactctagaggatccatggcaccgaagaagaagagaaaggtcgggattcacggcgttcctgcggcgatggataagaagtatagcattgggcttgacattggcacgaactccgtgggctgggccgtcatcaccgacgagtacaaggtgccgtctaagaagttcaaggtcctgggcaacaccgatcggcactcaatcaagaagaatctcattggagcactcctgttcgactccggagagacagcggaggccacgcggctcaagaggacagcgcgcaggcggtacacgcgcaggaagaatcgcatctgctacctccaggagatcttcagcaacgagatggcgaaggtggacgattcattcttccataggctggaggagtcgttcctcgtcgaggaagacaagaagcacgagcggcatccgatcttcggcaacatcgtggacgaggtcgcctaccacgagaagtacccaacaatctaccatctgcggaagaagctcgtggactcgacggataaggcggacctccgcctgatctacctcgccctggcgcacatgatcaagttcaggggccatttcctgatcgagggcgatctcaaccctgacaattccgatgtggacaagctgttcatccagctcgtccagacctacaatcagctcttcgaggagaacccgatcaatgcctctggcgtggacgccaaggcgatcctgtcagcgaggctctctaagtcacggcgcctcgagaacctgatcgcccagctccctggcgagaagaagaacggcctgttcggcaatctcattgccctctcgctgggcctcacccctaacttcaagtccaatttcgatctcgccgaggacgcgaagctgcagctctccaaggacacatacgacgatgacctcgataacctcctggcccagatcggcgatcagtacgcggacctgttcctcgccgcgaagaatctgtctgacgccatcctcctgtcagatatcctcagggtgaacaccgagatcacaaaggccccgctctcggcgtccatgatcaagcgctacgacgagcaccatcaggatctgaccctcctgaaggcgctggtcaggcagcagctcccagagaagtacaaggagatcttcttcgatcagtccaagaatggctacgcgggatacattgatggcggcgctagccaagaggagttctacaagttcatcaagccgatcctggagaagatggatggcacggaggagctcctggtgaagctcaatcgcgaggacctcctgaggaagcagcggaccttcgataacggcagcatcccacaccagatccatctcggcgagctgcatgcaatcctgcgccgccaagaggacttctaccctttcctcaaggataaccgcgagaagatcgagaagatcctgacgttcaggattccttactacgtgggaccactggccaggggcaatagccgcttcgcgtggatgacccgcaagtctgaggagacaatcacgccgtggaacttcgaggaagtggtcgataagggcgccagcgcgcagtctttcatcgagaggatgaccaatttcgacaagaacctgcctaatgagaaggtgctcccgaagcattccctcctgtacgagtacttcaccgtctacaacgagctcacaaaggtgaagtatgtgacggagggcatgaggaagccagccttcctgagcggcgagcagaagaaggcgatcgtggacctcctgttcaagaccaatcggaaggtgacagtcaagcagctcaaggaagactacttcaagaagatcgagtgcttcgattctgtggagatctcaggcgtcgaggaccgcttcaacgcctccctcggcacataccacgatctcctgaagatcatcaaggataaggacttcctggacaacgaggagaatgaggatatcctcgaggacatcgtgctgaccctcacactgttcgaggatcgggagatgatcgaggagcgcctgaagacatacgcccatctcttcgatgacaaggtcatgaagcagctcaagcgcaggcggtacaccggatggggccgcctgtcaaggaagctcatcaatggcatccgggacaagcagtcaggcaagacaatcctcgacttcctgaagtcggatggcttcgcgaaccgcaatttcatgcagctgatccacgatgactctctcaccttcaaggaagacattcagaaggcccaggtgagcggacagggcgactctctgcacgagcatatcgccaacctcgcgggctcaccagcgatcaagaagggcatcctgcagaccgtgaaggtggtcgatgagctcgtgaaggtcatgggcaggcataagcctgagaacatcgtcatcgagatggcccgcgagaatcagaccacacagaagggccagaagaactctcgcgagaggatgaagaggatcgaggaaggcatcaaggagctgggctcacagatcctcaaggagcacccggtggagaacacacagctgcagaatgagaagctctacctgtactacctccagaatggccgcgatatgtatgtggaccaggagctggatatcaacaggctctcggattacgacgtggatcatatcgtccctcagtcgttcctgaaggatgactccatcgacaataaggtgctcacgaggtccgacaagaaccggggcaagtcagataatgtcccgtcggaggaagtggtcaagaagatgaagaactactggcgccagctcctgaatgccaagctgatcacccagcggaagttcgataacctcacaaaggcggagcgcggcggcctctctgagctggacaaggcgggcttcatcaagaggcagctggtggagacacgccagatcacaaagcacgtcgcgcagatcctcgattctcggatgaacaccaagtacgatgagaatgacaagctgatccgcgaggtgaaggtcatcacactgaagtcgaagctcgtgtccgacttcaggaaggatttccagttctacaaggtccgggagatcaacaattaccaccatgcccatgacgcctacctcaatgcggtggtgggcacggcgctgatcaagaagtacccaaagctcgagtccgagttcgtgtacggcgactacaaggtgtacgatgtcaggaagatgatcgccaagtccgagcaggagatcggcaaggccaccgcgaagtacttcttctacagcaacatcatgaatttcttcaagacggagatcaccctggccaatggcgagatccggaagcgccctctcatcgagacgaacggcgagacaggcgagatcgtgtgggacaagggccgcgatttcgcgaccgtgaggaaggtcctctcaatgccgcaggtcaatatcgtcaagaagacagaggtccagacgggcggcttctcaaaggagtcgatcctgccaaagcggaactcggataagctcatcgcccgcaagaaggactgggatccaaagaagtacggcggattcgacagccctaccgtggcctactctgtcctggtggtcgcgaaggtggagaagggcaagtccaagaagctcaagagcgtcaaggagctcctgggcatcacaatcatggagcgctccagcttcgagaagaatccaatcgatttcctcgaggcgaagggctacaaggaagtgaagaaggacctgatcatcaagctccctaagtactctctcttcgagctggagaacggcaggaagcggatgctcgcctcagcgggcgagctccagaagggcaatgagctcgccctgccgtccaagtatgtgaacttcctctacctggcgtcccactacgagaagctcaagggcagcccagaggataacgagcagaagcagctgttcgtcgagcagcacaagcattacctcgacgagatcatcgagcagatctccgagttctccaagcgcgtgatcctcgccgacgcgaatctggataaggtcctcagcgcctacaacaagcaccgcgacaagcctatcagggagcaggcggagaatatcatccatctcttcacgctgaccaacctcggcgccccggccgcgttcaagtacttcgacacgaccatcgatcgcaagaggtacacatctacgaaggaagtgctggatgcgaccctcatccaccagtccatcacgggcctgtacgagacacgcatcgacctcagccagctcggaggtgacaagagacccgcagcaacaaagaaggcagggcaggctaagaagaagaagtgacaattcgctgaaatcaccagtctctctctacaaatctatctctctctattttctccataaataatgtgtgagtagtttcccgataagggaaattagggttcttatagggtttcgctcatgtgttgagcatataagaaacccttagtatgtatttgtatttgtaaaatacttctatcaataaaatttctaattcctaaaaccaaaatccagtactaaaatccagatctcctaaagtccctatagatctttgtcgtgaatataaaccagacacgagacgactaaacctggagcccagacgccgttcgaagctagaagtaccgcttaggcaggaggccgttagggaaaagatgctaaggcagggttggttacgttgactcccccgtaggtttggtttaaatatgatgaagtggacggaaggaaggaggaagacaaggaaggataaggttgcaggccctgtgcaaggtaagaagatggaaatttgatagaggtacgctactatacttatactatacgctaagggaatgcttgtatttataccctataccccctaataaccccttatcaatttaagaaataatccgcataagcccccgcttaaaaattggtatcagagccatgaataggtctatgaccaaaactcaagaggataaaacctcaccaaaatacgaaagagttcttaactctaaagataaaagatctttcaagatcaaaactagttccctcacaccgttaattaacccgggggatcatgaaccaacggcctggctgtatttggtggttgtgtagggagatggggagaagaaaagcccgattctcttcgctgtgatgggctggatgcatgcgggggagcgggaggcccaagtacgtgcacggtgagcggcccacagggcgagtgtgagcgcgagaggcgggaggaacagtttagtaccacattgcccagctaactcgaacgcgaccaacttataaacccgcgcgctgtcgcttgtgtgcggcgccatcgggctcatggttttagagctagaaatagcaagttaaaataaggctagtccgttatcaacttgaaaaagtggcaccgagtcggtgctttttttgtcccttcgaagggcaattctgcagatatccatcacactggcggccgctcgaggtcgacggtatcgatcctaggggatcatgaaccaacggcctggctgtatttggtggttgtgtagggagatggggagaagaaaagcccgattctcttcgctgtgatgggctggatgcatgcgggggagcgggaggcccaagtacgtgcacggtgagcggcccacagggcgagtgtgagcgcgagaggcgggaggaacagtttagtaccacattgcccagctaactcgaacgcgaccaacttataaacccgcgcgctgtcgcttgtgttgctgcggccgagcatcgaggttttagagctagaaatagcaagttaaaataaggctagtccgttatcaacttgaaaaagtggcaccgagtcggtgctttttttgtcccttcgaagggcaattctgcagatatccatcacactggcggccgctcgaggtcgacggtatcgatcaattgacgcgtcacaggaaacagctatgacatgattacgaattcctgaattaacgccgaattaattcgggggatctggattttagtactggattttggttttaggaattagaaattttattgatagaagtattttacaaatacaaatacatactaagggtttcttatatgctcaacacatgagcgaaaccctataggaaccctaattcccttatctgggaactactcacacattattatggagaaactcgagttaaccctgagactgttggacagagctcattggtaccaggaacaggtggtggcggccctcggtgcgctcgtactgctccacgatggtgtagtcctcgttgtgggaggtgatgtccagcttggcgtccacgtagtagtagccgggcagctgcacgggcttcttggccatgtagatggacttgaactccaccaggtagtggccgccgtccttcagcttcagggccttgtgggtctcgcccttcagcacgccgtcgcgggggtacaggcgctcggtggaggcctcccagcccatggtcttcttctgcatcacggggccgtcggaggggaagttcacgccgatgaacttcaccttgtagatgaagcagccgtcctgcagggaggagtcctgggtcacggtcgccacgccgccgtcctcgaagttcatcacgcgctcccacttgaagccctcggggaaggacagcttcttgtagtcggggatgtcggcggggtgcttcacgtacaccttggagccgtactggaactggggggacaggatgtcccaggcgaagggcagggggccgcccttggtcaccttcagcttcacggtgttgtggccctcgtaggggcggccctcgccctcgccctcgatctcgaactcgtggccgttcacggtgccctccatgcgcaccttgaagcgcatgaactcggtgatgacgttctcggaggaggccattttggcgcgccggatcctctagacctagggtcgacctgcaagaaataatcaccaaacagatagggtaagaactagcacaagattaaggacacaacaacggatcaaacagcaaacatattccaacagaacatacatgtattcaaaaagatagtaacaggcacatcacacatgtattcagataggtagtaacagcacacgtatcctgaacttcagaaataagtagaatgaactagtggcaataatcttcacacagatagtaaaaagaaattaccacaatagattatatagatgaactacagattgtaacatgatattactacagattgtaacatgatattctaatatagttcttagcataaattactggcagatagtaacatgagatcattatgacagatatagcgataagacttcctatttaccattgacaattaattaaaagagttcatcattatctaatctgtgaacatatgaaatcaaatcgaaacgcacaagctacataattgaaccatgtctaagaagaactaccctacagatctacatcaaacacaaaacagatataacatattaaagcctgtgtttgcacccacccatggcaccaataactcaatcaagagcggaacagtagatctgaacatgctcgcaacaaggcctacaagatggaacacgctacaaatcgcaccaatcactcaggcatgactagttccacaattccccaacagatctacaccgatttccccaatcgaatcatccaacaattcatctaaccgtaaaaattccccccaatcatcagaaccaacatccaatcccaaaacctaaccacgattccacctatcgaaccaaccgtgcccaaatcacaaccatcagatctacaacccctaaacatctcacgataatcacatcgacaaccctaaccaccaatcggatctagcaacaaaacaacctcacccgtccgaaatcgaatcgaaacgaagcgaggagaggagaagcagcgtaccttgaggacgcgagaggattcgattcgacgacgagagcctcgcgagattggggagaaatttttcgggggtggagctgatgcgaggagaggagatgagggggctggtatttatggcggttgggtggtgggaggagtcccgtgccgtgacgtctccgtctgcttggagaatccgccacgctgaaaccaccgcggtttccgggaagacgaggcgggcgagcgagcggttgggaaatttcgagaagatgccgtttgtctccgtttggtacacgtctcgttgatttttttttagtgaattacgctttggaccacattttattatctaagggtgtgtttggttgtaagccacactttgccacagtttgccacgcctaaggttaggcaaatttgacaggtgtttggttgtagccacagttgtggcaagatttccctctaacaaattaagtcccacgtgtcaatggctcaaaaaagtgtggcaagattcccttaggcttagtaagttgtggctaacaatttgatcacctcaccttagacaaggtgtggcaacttttgttggcaagtaatggtaaagtatggctgggaaccaaacagcccctaagttttactttggactacctttaaacatatcttttcactttgaactagataaatttgctattgttgcgatttggatttttttttctcgtgcaatcaacgaccttaaacacatcagctctagtatacggccgatctcctctatatatggttcatatgtttgccgaaagggaagttagacatgacgaaaagttgttcatggtagtccaaaccacaacccggcccaatttgaaaagataggtttaagggtggtccaaattgaaacttgggtaataaaaggtggatcaaagtgcaatttacttttttttactgtaatttcttctggctggtttgttggtcgccgttaggaccgggtgacgccgtcaaccccgcgcctccgtattcgctgacgtggggtggcgcgctggcttccgccttgacccgaatttgttttccttccgttaaaaaaatggttttccttttcttaaaaaggaaatagtttgttttttaagtctgtgtattaggattattacacttgaattttggtatatgtgtaggataatttactgcatgtttataatagagttgtactatagatgaaataacccaatttttggtataattcgtgtttggttggaggtcaaaataacaggttattttgtgaagaaaaaactccgtagtatagtaccatatccatcatgaatacacatactgcctagacgagtgattaggatgaatccatgttatattcctcaaaataatataaaccacttgatcttatgatcttatccaatctgttcatataaactggagatataagatggtgcatttcccttttgatttcttttgttgacggccatgagataggttgcatccactgcatttatattttggaccaatacaatgcacctattgatacatggggacagctcaactaaccatgatgcaaaatgctggttggtgaccagttcttggcattatgataatgataggattaaaaaaaacagtgcaatgtctcggaaagaaaccatgacaaagggtacatgttgcattccagtttctaatgataaaattatgtgccagcaattcaaaaatcatgcgtgttccctacgcaccattctttgcaataaacaagtgcatgcacaatatgattgtgctaaggttcaagaacttgttgcagtggctaagttttggataagaccaatgaacaaacagtactagtagtttgttttatgaaatttgcatttctgcaggcatgcaagcttggcactggccgtcgttttacaacgtcgtgactgggaaaaccctggcgttacccaacttaatcgccttgcagcacatccccctttcgccagctggcgtaatagcgaagaggcccgcaccgatcgcccttcccaacagttgcgcagcctgaatggcgaatgctagagcagcttgagcttggatcagattgtcgtttcccgccttcagtttaaactatcagtgtttgacaggatatattggcgggtaaacctaagagaaaagagcgtttattagaataacggatatttaaaagggcgtgaaaaggtttatccgttcgtccatttgtatgtg

SEQ ID NO: 544 - DNA, 1866 bp, Oryza sativa
tgatgaggcatgcgcataattcaaactcgtctaagggggagtgttatgaaatctatcttattgtagacgaattaaattatgaatgggaaacttactacagaagaaagcttacgctgtaagctggaagccagcttacggcgcaagccagcttacaggagaagccagcttacagaggaagcccgcttacggcgtaagccggcttacgacgtaagccagaaggtccaaggcttacgacgtaagcctccaccctcctctgcctaaaaatagggcccagaaggtccaaggcgaggacaaccgatcttcggtctcctacttcttctcttgtagcttgtactcaaatccagaagaaataaagcttccactcgctcatactttctgtgttccacaactctgtgtttggtttgcttgtgtgctgatcagtagaatagactggtttctcaacattcttcacaaatccagtaaaaatcatgtgacttgctaactggagtattcctcagccgtaggcgcagggcaggggagtggggctgtgggggcaggtagtggggctccagttctccaccagcacaagggtccaaggcacgctgagtcagacccacttgggcggggcggggcgcggcgcggcggttttggttgctgcccgacacgcgaatccacgaatgcatcccatccatccccaccagcacacggaaaagcagggttgaggtaggggtaggacagaagcggcaaccacgcgacgtgcggacgcggcgcggcgcggcacgcccacccagaaattccccgagccgtgccgtccaacaccactcatccgatccgacggcccgcgggagcccgaccggccgcggagacacggagccgcccccgcgcaccacccccaggccccaggaccttggaacttcctcctcattcactccccgtcgcaccatgctctccgttaaccatagtccctctaaccacggttagttgctctccgagtcactctccaccgatcccagggttcttctacctctgcctgtctatatagctccctccccggcttctcatccgccgttccctccccctcgctctccctgctccggtatagctagttgagctctgatcgatcaggttgcatgagacggagaagctgagtgaggctagggtggttggttgtgatcatcaccatgagctgcaacggttgccgggtgctgcggaaggggtgcagtgacggctgcgtgctgcggccatgcctgcagtggatcgacgccgccgacgcgcagggccacgccaccgtcttcgtcgccaagttcttcggccgcgccggactcctctccttcatctccgctgtccccgaggcgcagcgacctggtatgtagaatacaatccatcacggctctgcacgtgtaccgtacatattcctgtacgaagcagctgaccatatgtcgttggttgcgcgcagcgttgttccagtcgctgctgtacgaagcagcggggcgaaccatcaatccggtgcacggcgcggtgggcctcctctggacggggaactggcccctctgccaggccgctgtcgagaccgtgctgcgtggaggcgccatcggccctctgccggagctcggcggggcctgcggcggcgctggcggggacctctacggcgccgccaagcgcaacggcggctggtctaccttctccactgcgaagcgggtgaggaaggccgaggtacctgaagccccgtcgtgcgacctaggcctgtgcctcagccccggctctccgccggcggtgggggagaggaaaccagcactgcggccggggacgccgtcaatgagctccgatgagtccggcaccacaaccggaggcgaaagggatcctgtgctgctcaacctttttgtctga

SEQ ID NO: 545 - DNA, 3252 bp, Oryza sativa
caacaatgggattactgagtactgacatggattagccgtgtctccccaaagagaaaaaaagttagacgaggttaatcaagtggccatcgatcaccacggtctctctctttctctcgctcagcgatgatgctcttggtccggaccaaaatacagcagcagcagcagcagtacaaagctctgacgctcgggtcccacatccgtcagaccatccgtccgtccgtccaagattcaggagacgaagcccatccgttggatggaccaaaagatgccgcggtcgatgcatatgtaaggatgcagatgcaggcagcatgctgtcgtcgaccgacccgatcgatcgatcgatctgtctctactgcagcacgacatcgccgtctcacagggcactggaaatgatgggtcgcctgcctgacctctctacacaaatcttaagcctagagacagacactgatataataataaatagagattgaccgggattttggtgctgtttgttaatggtgaccatccgacaaaatgctctatcaccgtcctctgcgtcctcgctctgcaccgactgattcaccacacttcacgttccacctcaccggagggtaaatacagcaatcaccgttccacacatttcgtacaattttgcttgtacaaaagctgatcaatttcgtgctcaaattaatagtacaaacccagccgaaaagcgctcacaaagccaaacaaacactcaatgtagcagcagcagcagcagcaatcagcatgagtgcccaccattgcttttttttttttttggtgccgtcttctccgtgttgttcgtggcacaacaggacatgatcgatcggtcaaagggtgaggggagaacgagacgacggtgcataaaaatcaaatggaatggaagcgagaagggagagaggagaggagcatgcatgcatcgttactccagtacgctgcgtacagcggccggccgcgccacgatctcgctgtctgctgctgctgcttccaactgctctctgctctgctctgcttctgctcctctcttcctctctaaaaagcgtcgccccaaccaacctgccccgtcctagctaaagccatagcagtaggcgggctacgcatcatctcccgatttggcaacacccatattgctgcagtgcagttgcagttgttgcggttgcagtgcaagagggagaagaggagtttcttggtgagggagagggagagatgagggacgtggtggtggcggttggcggcgggacgaaggcggcgagcaggcagcaggggcagggcggggtgacgttggcggcggcggcggcggggtcggggtcggggtcggcggcgtcgccatgcgcggcgtgcaagctgctgcggcggcggtgcgcggcggggtgcgtgttcgcgccctacttcccgccgggcgagccgcacaagttcgccaacgtccacaaggtcttcggcgccagcaatgtcagcaagctcctccaggtataccgcacgatcgctgcttcttctctcaatctatcgtcttctctccctagctgccatgccatgacatgccttgccttgcctcctcgtgtcgtgtgtacgcacgtctcacgagccctcaattccctctgtttccgtctacaatctctgtaccgccttctttctctgtatcatcgcgctcatgcacacacagacacagtcgagttactaccagttcttggatctttttttccttttcagttccgtgccaattcattagaaagatgtgatgtttcttgccattgtttagcccacagtttgtcaaatgtgtagtagtgcacaaaattgatatcttgtttcgccagaaatggattgcttatttttaacatatatggttaagaaagtttccccgggccataacgacgatgctagtactagggataatattggtttagtggtttcgtttgattacggtgttttcccaacatgtagcctgcaattctcaggaaaaaaaaattgaacgaaggcctgataatctcagaatgatatactgtattagatggtgtaatagtagattctgaatacaccgagattttgacaaattcggcaactatattttctgtttactagcagccagcctaaattcatttcctgggtatgccaagttcagaattgaactttcagaattttgcacttgttcttcagttttcaccgtgagtggcacatgtactgggcatgtgcatcaaaataaacatggcaaagatcctactttcactgcccactgggtcctcatccatgcagcaacccaaagcatttcttatgtgctaaagatcacctagccaaagaaaagaaaaagaaaagattgcttttttttttgtgagcaagttcgagtactgcagtgtgttgtagtactaattaaatcgacagagacctcagcatagtgatctccaaactgaaccctcccccatgtgtcgagccgcctgaaacagtagcccatcagtggtggtatacggcctcgtcctcacagtctcagcagccttgggcagtcaccttcacacaaggctcgcacatgctgcgtaaaaagaaaaagaaaaaaagctttcggctgcaccaaacatgcaaaaatgtccctaaaaatccttccttccattcccttttcttggaaccagagagacacccccaaatcgccaccatcttttctcaatttcttctccttggccctagcctcctagtagccttgtcacaatgtcactggctcactgtgtgtgtgcttgcacgattgtcaggtgggaatggacgtttcttctaccttgtcatgtactggtgcctgcacaaaaccagatcattcagatgtgacttgactgaaactctgctgctatgacaatcatatgtctgaaactttgggattgtggtggaatgcaggagataccggtgcagcacaggggggacgccgtgagcagcctggtgtacgaggcgaacgcgcgggtgagggacccgatctacggctgcgtcggcgccatctcgtcgctgcagcagcaggtggaggcgctgcaggcgcagctggcgctggcgcaggcggagatggtcaggctgaggatgagcaacgactacatcggccgccgcctccgggcgcgcggctgcggcggcggcggcggaggcggaggcgggagcaccaccaccaccaccggctcgccgtcgtccatgtcgtcgccggccaagacggcggagccggagccgctctgcaagcccacgccggagctggacatggtggtggaccagccggacttcggcttctggtcctactag

SEQ ID NO: 546 - protein, 204 aa, Oryza sativa
MSCNGCRVLRKGCSDGCVLRPCLQWIDAADAQGHATVFVAKFFGRAGLLSFISAVPEAQRPALFQSLLYEAAGRTINPVHGAVGLLWTGNWPLCQAAVETVLRGGAIGPLPELGGACGGAGGDLYGAAKRNGGWSTFSTAKRVRKAEVPEAPSCDLGLCLSPGSPPAVGERKPALRPGTPSMSSDESGTTTGGERDPVLLNLFV

SEQ ID NO: 547 - protein, 214 aa, Oryza sativa
MRDVVVAVGGGTKAASRQQGQGGVTLAAAAAGSGSGSAASPCAACKLLRRRCAAGCVFAPYFPPGEPHKFANVHKVFGASNVSKLLQEIPVQHRGDAVSSLVYEANARVRDPIYGCVGAISSLQQQVEALQAQLALAQAEMVRLRMSNDYIGRRLRARGCGGGGGGGGGSTTTTTGSPSSMSSPAKTAEPEPLCKPTPELDMVVDQPDFGFWSY

SEQ ID NO: 548 - DNA, 20 bp, Oryza sativa
tagctaggtagctgggtatt

SEQ ID NO: 549 - DNA, 20 bp, Oryza sativa
taagacggacagttaaacat

SEQ ID NO: 550 - DNA, 20 bp, Oryza sativa
aactctctattaagggaatt

SEQ ID NO: 551 - DNA, 20 bp, Oryza sativa
ccgtcgatccactcgatgct

SEQ ID NO: 552 - DNA, 20 bp, Oryza sativa
acgtgcgaggaagccagcga

SEQ ID NO: 553 - DNA, 20 bp, Oryza sativa
gcggcgccatcgggctcatg

SEQ ID NO: 554 - DNA, 20 bp, Oryza sativa
tgctgcggccgagcatcgag

SEQ ID NO: 555 - DNA, 20 bp, Zea mays
cattaaacgtacgagactgc

SEQ ID NO: 556 - DNA, 20 bp, Zea mays
tacgatgcagaggtgagctg

SEQ ID NO: 557 - DNA, 20 bp, Zea mays
gctcccgggtttaattttcc

SEQ ID NO: 558 - DNA, 20 bp, Glycine max
aagacacactcacacaccct

SEQ ID NO: 559 - DNA, 20 bp, Glycine max
cttctgtattattgtaagta

SEQ ID NO: 560 - DNA, 20 bp, Glycine max
ctctcttttctctctcatag

SEQ ID NO: 561 - DNA, 20 bp, Brassica napus
aacaactggacagactctgt

SEQ ID NO: 562 - DNA, 20 bp, Brassica napus
actaccctctctctctcaaa

SEQ ID NO: 563 - DNA, 20 bp, Brassica napus
tccgattgggattctaccgt

SEQ ID NO: 564 - DNA, 20 bp, Camelina sativa
tcttcattctccagaccctc

SEQ ID NO: 565 - DNA, 20 bp, Camelina sativa
aataaagagacatagggtac

SEQ ID NO: 566 - DNA, 20 bp, Camelina sativa
tctttttaccactctctcta

SEQ ID NO: 567 - DNA, 20 bp, Sorghum bicolor
cagcttatatatatcgagac

SEQ ID NO: 568 - DNA, 20 bp, Sorghum bicolor
ttacctgcgtagaggatcct

SEQ ID NO: 569 - DNA, 20 bp, Sorghum bicolor
tttctattcattgtagctag

SEQ ID NO: 570 - DNA, 20 bp, Medicago truncatula
tgtatggtcttatatcttgc

SEQ ID NO: 571 - DNA, 20 bp, Medicago truncatula
ctcaggttctccgcaaatgt

SEQ ID NO: 572 - DNA, 20 bp, Medicago truncatula
agtaaataagcattggttgt

SEQ ID NO: 573 - DNA, 20 bp, Triticum aestivum
tggacagtcgatcaccgtat

SEQ ID NO: 574 - DNA, 20 bp, Triticum aestivum
cctccccccgatttcaatgg

SEQ ID NO: 575 - DNA, 20 bp, Triticum aestivum
gtataactttagccagatgg

SEQ ID NO: 576 - DNA, 20 bp, Zea mays
cgtggatccagtcgatgctg

SEQ ID NO: 577 - DNA, 20 bp, Zea mays
gaggaccagaccggtgatca

SEQ ID NO: 578 - DNA, 20 bp, Medicago truncatula
tgttacgagattgtctaacg

SEQ ID NO: 579 - DNA, 20 bp, Medicago truncatula
gaatcggagtcttccacgtt

SEQ ID NO: 580 - DNA, 20 bp, Triticum aestivum
gggaggcgacgaggccggcg

SEQ ID NO: 581 - DNA, 20 bp, Triticum aestivum
agcagcaggtgaagctgccg

SEQ ID NO: 582 - DNA, 20 bp, Zea mays
tttgatctcgttgctgctat

SEQ ID NO: 583 - DNA, 20 bp, Zea mays
tttcaactgctattagggta

SEQ ID NO: 584 - DNA, 20 bp, Zea mays
gcgatacattgatacatacg

SEQ ID NO: 585 - DNA, 20 bp, Zea mays
gttgtgagacgaagagctcc

SEQ ID NO: 586 - DNA, 20 bp, Zea mays
gctccctgcgtgttgtagtt

SEQ ID NO: 587 - DNA, 20 bp, Zea mays
tatcctctgttggtgcgcta

SEQ ID NO: 588 - DNA, 20 bp, Zea mays
tcaaacatacactttccagg

SEQ ID NO: 589 - DNA, 20 bp, Zea mays
atgaatcgacctgccactta

SEQ ID NO: 590 - DNA, 20 bp, Zea mays
cttcaaatatgtctgcctcg

SEQ ID NO: 591 - DNA, 20 bp, Zea mays
agtacaagacacagggattc

SEQ ID NO: 592 - DNA, 20 bp, Zea mays
cacctagctaggagagatgc

SEQ ID NO: 593 - DNA, 20 bp, Zea mays
ttattggaccagaaagggta

SEQ ID NO: 594 - DNA, 20 bp, Zea mays
ttagtgttatcgtgacatac

SEQ ID NO: 595 - DNA, 20 bp, Zea mays
accgctggcacaacgttgcg

SEQ ID NO: 596 - DNA, 20 bp, Zea mays
gcagcagcagttcttggggc

SEQ ID NO: 597 - DNA, 20 bp, Zea mays
aatttctcggcttggtttgg

SEQ ID NO: 598 - DNA, 20 bp, Zea mays
agggccttaattggcaaacg

SEQ ID NO: 599 - DNA, 20 bp, Zea mays
aggagttgctctaatcggtt

SEQ ID NO: 600 - DNA, 20 bp, Zea mays
acgcgctccattccggatcg

SEQ ID NO: 601 - DNA, 20 bp, Zea mays
aggtcgagccggatgaagcc

SEQ ID NO: 602 - DNA, 20 bp, Zea mays
ttctctgcgcaaaagattcc

SEQ ID NO: 603 - DNA, 20 bp, Zea mays
gtgtgagaagcggtaactcg

SEQ ID NO: 604 - DNA, 20 bp, Zea mays
gattggcgtttcgggacgtc

SEQ ID NO: 605 - DNA, 20 bp, Zea mays
cgaggtccagacccagatcc

SEQ ID NO: 606 - DNA, 20 bp, Zea mays
gccgacggtggccgctacac

SEQ ID NO: 607 - DNA, 20 bp, Zea mays
agtcacgagagagatgccac

SEQ ID NO: 608 - DNA, 20 bp, Zea mays
tatctaacttgtcaagctat

SEQ ID NO: 609 - DNA, 20 bp, Zea mays
agacggacggtacgcccctg

SEQ ID NO: 610 - DNA, 20 bp, Zea mays
agaagccggcggcggggtac

SEQ ID NO: 611 - DNA, 20 bp, Zea mays
gggcgtgcttctcgcccacg

SEQ ID NO: 612 - DNA, 20 bp, Zea mays
gggagcagcctgagcaatgt

SEQ ID NO: 613 - DNA, 20 bp, Zea mays
atataatagagataatccta

SEQ ID NO: 614 - DNA, 20 bp, Zea mays
aaatcaggaccttaacttga

SEQ ID NO: 615 - DNA, 20 bp, Zea mays
agcaccgcggcgtatgcgcc

SEQ ID NO: 616 - DNA, 20 bp, Zea mays
gaatgtcgttgacgcggtct

SEQ ID NO: 617 - DNA, 20 bp, Zea mays
tggttcgatgcggaacgcga

SEQ ID NO: 618 - DNA, 20 bp, Zea mays
gcgcggactgacatgcggca

SEQ ID NO: 619 - DNA, 20 bp, Zea mays
acaagccgacggaaaaccag

SEQ ID NO: 620 - DNA, 20 bp, Zea mays
tcggctacggctacgggtac

SEQ ID NO: 621 - DNA, 20 bp, Zea mays
cacgatgctatgccatccgc

SEQ ID NO: 622 - DNA, 20 bp, Zea mays
gttcttcctaccagccggcc

SEQ ID NO: 623 - DNA, 20 bp, Zea mays
agatattcttcggccccggt

SEQ ID NO: 624 - DNA, 20 bp, Zea mays
aagacggcagaccacccgac

SEQ ID NO: 625 - DNA, 20 bp, Zea mays
cccgccaaaaacgaggacgg

SEQ ID NO: 626 - DNA, 20 bp, Zea mays
ggcatggcgcagtaggactc

SEQ ID NO: 627 - DNA, 20 bp, Zea mays
aatggtgatggggcgcggaa

SEQ ID NO: 628 - DNA, 20 bp, Zea mays
gcgccagcacgaatcgtatc

SEQ ID NO: 629 - DNA, 20 bp, Zea mays
caggtacactaaacgcgaga

SEQ ID NO: 630 - DNA, 20 bp, Zea mays
cgtggccaagacgtaccgca

SEQ ID NO: 631 - DNA, 20 bp, Zea mays
aggacggcgcgagcatcaag

SEQ ID NO: 632 - DNA, 20 bp, Zea mays
tgggaacaacacagaccgta

SEQ ID NO: 633 - DNA, 20 bp, Zea mays
atccacacgggttcgccgtt

SEQ ID NO: 634 - DNA, 20 bp, Zea mays
ttgtcgcggagccaaaaccc

SEQ ID NO: 635 - DNA, 20 bp, Zea mays
ctccatgtccacgtggtgcc

SEQ ID NO: 636 - DNA, 20 bp, Zea mays
gctgtaaacagaagaggttc

SEQ ID NO: 637 - DNA, 20 bp, Zea mays
agccgaggaccccaagagat

SEQ ID NO: 638 - DNA, 20 bp, Zea mays
tgtagggaatttaccgtaaa

SEQ ID NO: 639 - DNA, 20 bp, Zea mays
attccttcactatttagagc

SEQ ID NO: 640 - DNA, 20 bp, Zea mays
gatgcgagacgtgagactgt

SEQ ID NO: 641 - DNA, 20 bp, Zea mays
cacaattgtatacctgcaga

SEQ ID NO: 642 - DNA, 20 bp, Zea mays
gtcatccagtaagctgcgct

SEQ ID NO: 643 - DNA, 20 bp, Zea mays
catcttcccaacgccctgcc

SEQ ID NO: 644 - DNA, 20 bp, Zea mays
tgtcgagcactaaaggcagg

SEQ ID NO: 645 - DNA, 20 bp, Zea mays
gcgtcgaagccggtgacaga

SEQ ID NO: 646 - DNA, 20 bp, Zea mays
ctgcagatgccctactcggg

SEQ ID NO: 647 - DNA, 20 bp, Zea mays
tcgctcttgatcgttgcagc

SEQ ID NO: 648 - DNA, 20 bp, Zea mays
tttatctcctcacctcttcc

SEQ ID NO: 649 - DNA, 20 bp, Zea mays
gtggtttacgagtattcgaa

SEQ ID NO: 650 - DNA, 20 bp, Zea mays
gtccgccgacttgccaccca

SEQ ID NO: 651 - DNA, 20 bp, Zea mays
tcggcgtcgtcgtagccgcc

SEQ ID NO: 652 - DNA, 20 bp, Zea mays
accagctcgattagctcagc

SEQ ID NO: 653 - DNA, 20 bp, Zea mays
atctccatcattcaccgaga

SEQ ID NO: 654 - DNA, 20 bp, Zea mays
attaattctttccgcgcgtg

SEQ ID NO: 655 - DNA, 20 bp, Zea mays
cgcgagccgacccaagccgg

SEQ ID NO: 656 - DNA, 20 bp, Zea mays
gacgagggtcgctctcaccc

SEQ ID NO: 657 - DNA, 20 bp, Zea mays
ggagcatcgagccatttccg

SEQ ID NO: 658 - DNA, 20 bp, Zea mays
gtttgcaaacaggaggaact

SEQ ID NO: 659 - DNA, 20 bp, Zea mays
aacagttgtcccggaatttg

SEQ ID NO: 660 - DNA, 20 bp, Zea mays
gtgcgtgccacggagatgct

SEQ ID NO: 661 - DNA, 20 bp, Zea mays
ccagctacaagggtcacagc

SEQ ID NO: 662 - DNA, 20 bp, Zea mays
ccgtgttccgtgccacaatc

SEQ ID NO: 663 - DNA, 20 bp, Zea mays
ttttcttttttggcgcaaac

SEQ ID NO: 664 - DNA, 20 bp, Zea mays
gggtcatcagtattatcttt

SEQ ID NO: 665 - DNA, 20 bp, Zea mays
cccacaccgtcctgcgtcgg

SEQ ID NO: 666 - DNA, 20 bp, Zea mays
acacaccattctacagtgat

SEQ ID NO: 667 - DNA, 20 bp, Zea mays
catcgtagtaactgcctcat

SEQ ID NO: 668 - DNA, 20 bp, Zea mays
agcttggtcgcattacgaat

SEQ ID NO: 669 - DNA, 20 bp, Zea mays
ataaaagggtatatgtttag

SEQ ID NO: 670 - DNA, 20 bp, Zea mays
aattgctgatgatactagtc

SEQ ID NO: 671 - DNA, 20 bp, Zea mays
cgcgaaaagatcgtctgata

SEQ ID NO: 672 - DNA, 20 bp, Zea mays
atgagttgcagaatgtttct

SEQ ID NO: 673 - DNA, 20 bp, Zea mays
atatattggtgataaagcaa

SEQ ID NO: 674 - DNA, 20 bp, Zea mays
aagacatggagctcattaag

SEQ ID NO: 675 - DNA, 20 bp, Zea mays
cattgaagaactgcataatc

SEQ ID NO: 676 - DNA, 20 bp, Zea mays
gtacataggattacccggca

SEQ ID NO: 677 - DNA, 20 bp, Zea mays
aaccagcgagggaacgttga

SEQ ID NO: 678 - DNA, 20 bp, Zea mays
cagcgtcacgctcccgggaa

SEQ ID NO: 679 - DNA, 20 bp, Zea mays
gcttgataaagaatctcgta

SEQ ID NO: 680 - DNA, 20 bp, Zea mays
gcgcggtgtgcgcggagctg

SEQ ID NO: 681 - DNA, 20 bp, Zea mays
gaaagaagggaactacgaag

SEQ ID NO: 682 - DNA, 20 bp, Zea mays
ttcccgcagcgagcatcaaa

SEQ ID NO: 683 - DNA, 20 bp, Zea mays
aatagtattggcgtctaaca

SEQ ID NO: 684 - DNA, 20 bp, Zea mays
aatccatacaagagagtcca

SEQ ID NO: 685 - DNA, 20 bp, Zea mays
gctggagtcgtagcaggaca

SEQ ID NO: 686 - DNA, 20 bp, Zea mays
tgatctggatacgattcgtc

SEQ ID NO: 687 - DNA, 20 bp, Zea mays
tgagcgcgccaggtacgtgg

SEQ ID NO: 688 - DNA, 20 bp, Zea mays
gcgtgacgtacgccgcggaa

SEQ ID NO: 689 - DNA, 20 bp, Zea mays
cgcaattctcttgggccggt

SEQ ID NO: 690 - DNA, 20 bp, Zea mays
tcgttaccgcaaacgttgta

SEQ ID NO: 691 - DNA, 20 bp, Zea mays
cggaggggacgcattgcgta

SEQ ID NO: 692 - DNA, 20 bp, Zea mays
gcgccttggagtcgtgtagc

SEQ ID NO: 693 - DNA, 20 bp, Zea mays
cggcatctagcaacgaatta

SEQ ID NO: 694 - DNA, 20 bp, Zea mays
gcagacgcgtaaatccgagc

SEQ ID NO: 695 - DNA, 20 bp, Zea mays
tatgctaatatcccccgttt

SEQ ID NO: 696 - DNA, 20 bp, Zea mays
tacgcatgtctagtaacgca

SEQ ID NO: 697 - DNA, 20 bp, Zea mays
ctgaagccgaaccagcctgg

SEQ ID NO: 698 - DNA, 20 bp, Zea mays
acgggtcatggtagctccag

SEQ ID NO: 699 - DNA, 20 bp, Oryza sativa
caacagcaacagtgtcaaca

SEQ ID NO: 700 - DNA, 20 bp, Oryza sativa
gaaggagaacaagatgttcg

SEQ ID NO: 701 - DNA, 20 bp, Oryza sativa
tttgatgtaccactattagc

SEQ ID NO: 702 - DNA, 23 bp, Medicago truncatula
gagaaagggatgcagtgaggatt

SEQ ID NO: 703 - DNA, 23 bp, Camelina sativa
aatccattgaatacatggtcgga

SEQ ID NO: 704 - DNA, 23 bp, Brassica napus
atctccgccgtaccggaatctca

SEQ ID NO: 705 - DNA, 23 bp, Zea mays
ccccagcatcgactggatccacg

SEQ ID NO: 706 - DNA, 23 bp, Oryza sativa
tcgtccgcccgcacgcctcgtac

SEQ ID NO: 707 - DNA, 23 bp, Sorghum bicolor
tggacggcggcgcggaggaggag

SEQ ID NO: 708 - DNA, 23 bp, Glycine max
gatccactgcaaacaagggcgca

SEQ ID NO: 709 - DNA, 23 bp, Triticum aestivum
tcgccaagttcttcggccgcgcc

SEQ ID NO: 710 - protein, 241 aa, Artificial Sequence
  Synthetic construct YTEN(II56)
MSCNGCRVLRKGCSDACVLRPSIEWIDGAQPQANATVFVAKFFGRAGLVASLAAVPLHHRPALFRSLLYEACGRTINPVSGAIGLMWTGNWALCQAAADAVLRGESLHALSTIPAAFTDRDMDGLYGSVGAAASSSSPENSSSAPSRKRGRNNNNGGLAFVNAAAAAAVPATGACQNPPAGLLQSCELDLCLTPASSPMAGSGSRGCGGASDEYSATTTCEDLQATGDVEARAPALLNLFH

SEQ ID NO: 711 - DNA, 19 bp, Oryza sativa
gccgagcatcgagtggatc

SEQ ID NO: 712 - DNA, 18 bp, Artificial Sequence
  Synthetic construct guide #7 dTF22 variant 1
gccgagcatgagtggatc

SEQ ID NO: 713 - DNA, 20 bp, Artificial Sequence
  Synthetic construct guide #7 dTF22 variant 2
gccgagcatctgagtggatc

SEQ ID NO: 714 - DNA, 20 bp, Artificial Sequence
  Synthetic construct guide #7 dTF22 variant 3
gccgagcatcagagtggatc

SEQ ID NO: 715 - DNA, 20 bp, Artificial Sequence
  Synthetic construct guide #7 dTF22 variant 4
gccgagcatccgagtggatc

SEQ ID NO: 716 - DNA, 17 bp, Artificial Sequence
  Synthetic construct guide #7 dTF22 variant 5
gccgagcagagtggatc

SEQ ID NO: 717 - DNA, 23 bp, Oryza sativa
gcggcgccatcgggctcatgtgg

SEQ ID NO: 718 - DNA, 22 bp, Artificial Sequence
  Synthetic construct guide #6 dTF22 variant 1
gcggcgccatcgggctatgtgg

SEQ ID NO: 719 - DNA, 24 bp, Artificial Sequence
  Synthetic construct guide #6 dTF22 variant 2
gcggcgccatcgggctctatgtgg

SEQ ID NO: 720 - DNA, 24 bp, Artificial Sequence
  Synthetic construct guide #6 dTF22 variant 3
gcggcgccatcgggctcaatgtgg

SEQ ID NO: 721 - DNA, 21 bp, Artificial Sequence
  Synthetic construct guide #6 dTF22 variant 4
gcggcgccatcgggcatgtgg

SEQ ID NO: 722 - DNA, 210 bp, Glycine max
atggcatcatcttggactccaaggcaaaacaaactatttgaagaggcccttgctatatatgatagggaaacccctgacaggtggcagaatgtggcaagagtagtgggaaaatccgtagaggatgttaaaagacactatgaaatcctcaaagaagatatcaagcgcattgagcgtggacaaatcccattacctaactatgcaggttcttga

SEQ ID NO: 723 - DNA, 1245 bp, Glycine max
atgaatgaaattcaaatactaattgttgctatcacaattcacaagagattggattttggaatggaaagggtgttgtcagtagatgagatatcggagcaatactgggtggctgcatcatcttcttcatcatcatcatcatcatcgttcaagtcaaagatgaaccggagcgaatccgaatgggcctttcagcagttcctacagcaggaagctgcttcttcttcatctaattctgatcatgatgatgatcatcatcatgctaaactcaaaaaggaatccaacaccaacatccctgttactctacatgttgattcccaagactaccatgctattcttaagaccaagcttaatctcgcatgcgctgctgttgctatgactcggggatctttggtcaaatctcaaaaccctgacagtggaccacaggcatctaatttttctgaagttggatcgcatgctaccttaaaaggatctggcccttttggaaatgatgatccctctaaattacaaaataaagatatcaaagcacaaattgggattccttcctcaccttccatgcaaaacaaatccgctgtcgtcgcaatgaggccaacaataagtggatcatcaggagaacaatcagatgatgaggaagcggaaggagagattaatatgactggaaacatgactcctgttgatgcaaaacgagtaaggaggatgctttctaatagggagtcagccagacgctcaagaagaagaaagcaggctcatttaactgagctggagacacaggtctcccaattaagaagcgaaaattcttctttgttaaagcgcttcacggatgtgagccagaaatacagtaatgctgcagttgacaacagagtactgaaagctgatgttgaaacattaagagcaaaggtgaagatggctgaagagacagtgaaaagaattactgggttgagcccaatgctccatgccatgactgagatgtcatcactgggaatgccattgtttgatgaaagtccttctgagacatcagctgatgctgctgttccagtgcaagaagacccaaatcatcacctttgtcaacccacttctaataatgggttgggaggcatttcttcaattgaaactgtgcagcagaatgttgcagcagtggtaggtggcaacaaaatggggagaacaacttccctgcatagagtggctagcctggaacatcttcagaagcggattcgtggtggtgcagattcacgtggaactccttctaattga

SEQ ID NO: 724 - DNA, 1104 bp, Glycine max
atggttgtttgcgacttctgggagctcagtctcgctcagagtcagagaaaaacacccaaatcaaatattatcatggagcccagcttggatttgagactgggctttgtccccaaacccctttccctgtttttcggcgacgtttctgggaacagagacaagtgcgacaaagtggtcacactcgatggcttcgtgcagagattggaggaagagttgacaaaggtcgaggctttcaaacgcgagcttcctctctgcattctcctcctaaacgatgctatagcgagattgaaggaggaaaaagtgaagtgttcgggaatgcaagatccgcctcttaaaaccagttcaggaggaaatgaaaatgaaaactctgagaagaagaattggatgagttcagcacagctttggagcactcagaaatccaaatcgaggaatgaggaagatgataggtctgtgccagcgaactcaattaatgggaattcgtgtgtccccgagaaggagggctcgcaagttccgagctttggtttgatggctcgtgcttctgaactgagtcatagcaattccaagagtgttggtggagatactagttctggctcctctttgctccgtgttgaggtacagagtcagccacagccgccgcagcatatgcagcagaatccgaggaaacaacggcggtgctggtcgccggagcttcaccggcgctttgtggacgcccttcaacaacttggtggagcacaagtggccactcctaaacagattagagaactgatgcaggtggaaggccttacaaatgatgaagtgaaaagtcatttgcaaaagtacaggcttcatgttaggagattcccagttttttcaattggccaggttgataatggctcatggatgacacaggatgaatgtggggataaatcaaagggaaacatgtcacagtctggttctccacagggtcctctcacacctctgctcctaggaggagcaggatccgctaagggtctctcaagccctggacggaacagtgtggatgcagaagatgagcaatcatcagattgccggaattggaaaggagggctccaccaccagcagcttgaaactgataatcacagcctctaa

SEQ ID NO: 725 - DNA, 1125 bp, Glycine max
atgggaattgaaagaggaggcttcaagggattcaggagcgcctggagcgtgccgcccaagccgtgcgattcctgcaagctggcctcggcggcgcttttctgccgccccgattccgcgtttctctgcatcgcctgcgattccaacattcactgctcgaacaaactcgcgtcgcgccacgagcgcgtgtggatgtgtgaggtgtgcgagcaggcacccgctgctgtcacgtgcaaggccgacgccgccgccctctgcgtcacgtgtgactccgacatccactccgcgaaccccctcgcgcaacgccacgagcgcgtccccgtggaacctttctttgactccgctgagtccatagtgaaagcctctgctgccgccaccttcgggttcattgtcccatccgacgacggcggcgcctccgacgctttcgcccccgatgactccgacgccgccgcgtggctcatcccgaaccctaatttcgggtccaagctcatggacgcccccgaaatcaagtccaaggagatattcttctctgaaatggaccccttcctcgattttgattactcaaactccttccaaaacaacaacagcgccggaaacgacagcgtcgttccagttcaaaaaccctctctcgcccctcccctaatcaataatcaccaccaccaccaatcagaaacttgcttcgacgtcgatttttgtcgctcgaagctctcctcctttaactacccttccaattctcttagccaaagcgtttcgtcgtcgtcgcttgatgttggagtggtgccggacgggaacacggtgtcagacatgtcgtattcttttggtcggaacagttcggattcgagtgggattgttgttgtgtcaggaaatagtgtggggcaaggtgcgacgcagttgtgtggaatggatcgggaagcgagggtactgcgatacagagagaaaaggaagaaccgaaaattcgagaagacaattcgatacgcatcgcgaaaagcatatgcggaaacccggcccaggataaaaggccgcttcgccaaacgaacagaaattgactcggatgtggagcgtctctatagccctggccctgcggtgctcatgctggacactccatacggcgtcgtaccatcgttttag

SEQ ID NO: 726 - DNA, 1212 bp, Glycine max
atggatagggtgttctcagtggacgatatctccgatcacttctggcagccgcctatccctgtctccgccgcccaaacttcctcccagatgagccgcagcgcctccgagtgggccttccaacgcttcctccaggaagcttccgcctccgcaccctctcctccgtcttcttcctccgccgccgacgtcgtattcgtcgagatcgaagatcaacctaaacccgcccctccccctccgacaaacggcgccgttctccccaatgcccctggtcccgtcccccttgactccgacgaataccaggccttcctcaagagcaagctcaacctcgcatgcgccgccgtcgccatgactaggggatctttggctaaatctcaagacccgtcccctttttctgaaggtggatcacagccgactaatccttctctagttgaatctcagactacttctaaaggatctattccttctgaaaatgatccatctaagttacaagataaagataccaatgtaccagttgggattccttccatacctgccatgcaaaagaaacctgctgttgcaattaggccatctacaagtggatcatcaagagaacagtcagatgatgaggacattgagggagagacatctatgaatgacaacacggaccctgctgatgtaaaacgagtaaggaggatgctatccaatagggagtcagcccgacgctctagaagaagaaagcaggctcatttaactgacctagaaacacaggtttctcaattaagaggtgaaaattctaccttgttaaagcgccttactgatgttagtcagaaatacagcgactctgctgttgacaacagagttttaaaagctgacgttgaaacattaagaacaaaggtgaagatggccgaagagaccgtcaaaagaattactggattgaacccattgcttcatgccatgtctgatatatcatcactgggcctgccatcatttgatggaagaagcccttcagacacttcagctgatgcagctgttcctgtgcaagatgatccacatcatcacttctatcaacccacatctactaatcctattcccagtcatgatccgatagtcaacaatggattggggggcatttcttcaattgaaaatgtgcagcagaatgctgcagtagtgctaggtgggaacaagatgggtcaaacagcatccctgcagcgggtggctagcttggaacatctatag

SEQ ID NO: 727 - DNA, 624 bp, Glycine max
atgttttccatcaatcatttctccgacccagatgccacctcgccggggtcgggaggaagctcccgaccggcgctgtcggacgaggatttttttctggcggcaagcaatcccaagaaacgcgccgggaggaagaagttccgggagacgcgccacccggtgtaccgcggcgtgagaaggcgggactccggcaagtgggtgtgcgaggtgcgcgagcccaacaagaagtccaggatttggctcgggacctttcccacggcggagatggcggcgcgtgcgcatgacgtggcggcgatcgcgctgaggggaaggtcagcctgcctcaacttcgccgactccgcgtctcggctcccggtgccggcgacggcggaggccagggacattcagaaggctgcggcggaggccgcagaggcgtttcgccctgggaaggatgatgatgcggtggcggagagggtggcagcgacggcgacggagcgtgaagaagaacaagaagaagggatggtgccggagtatctgaggaacatggtgctcatgtcgccgacgcattgcttcgggagtgatgagtatggaagtgctgacgtggaatttgacgatgctgaagtttctctgtggagttactccatttaa

SEQ ID NO: 728 - DNA, 717 bp, Glycine max
atggaatatacttattcagcaggtgtagaggcagaaactcacacaagtagcagcaccaccccatcaagatcaaagaagagaaacaacaacacaagaaggttcagtgatgaacaaatcaaatcattggagaccatgtttgaatcagagtcaaggcttgagcctagaaagaagttgcagctggccagagagcttggattgcagccaaggcaagttgctatatggtttcagaacaagagggctaggtggaagtcaaagcaacttgagagagactatggcatactccaatccaattacaacagtttggcttcccgttttgaagctcttaagaaggaaaatcaaacattactaattcagctgcagaagctgaatcatctaatgcagaagccaatggagccaggtcagagatgcacacaagttgaagcagcaaacagcatggacagtgaatcagaaaatggaggcaccatgaaatgtgaagctgagggaaagccaagcccatcaatggaaatatcagaacatttacttggtgttctgtctgatgatgacacaagcataaaggtggaagactttggcctagaagatgaacatggccttctgaattttgctaagcatgttgatggttccttgacttcaccagaagattggaatgcttttgaatccaatgatctattaggccaatcaaccactgatgattaccaatggtgggacttctggtcctga

SEQ ID NO: 729 - DNA, 1533 bp, Glycine max
atggacggaagagcgagcagcagcgtgggcggagaagcatcgccagctccagcaccggtgccgataacgaatgcgaacgcgccgccgcctttcttgagcaagacatacgagatggtagaggacccttcgacggactcgatagtgtcgtggagtccaacgaacaacagtttcgtggtttggaaccctcccgagttcgccagagatctcttgcccaaacacttcaagcacaacaacttctccagcttcgttcgccaattaaacacctacggatttaggaaggtagatccagatcgctgggaatttgcaaatgagggatttttgaggggtcaaaagcacttgcttaagactataactcggcggaaacctgcccatggtcataatcaacaggcacagcaagcacatggacagagttcatctgttggggcttgtgttgaagttgggaagtttggacttgaggaagaggttgagattctcaagagagataagaatgtgctcatgcaagagcttgtgagattgaggcagcagcaacaggctactgataaccagctgcagagtatggttcagcgccttcaaggaatggagcaacgacagcaacaaatgatgtcattccttgcaaaggctgttcagagtcctggttttttagctcaatttgtacaacagcaaaatgagagtagtagacgcataacggaggcaaataaaaaacgccggcttaagcaggagggtattggtgaaatggaacatactgctgcttctgatggccaaattgttaaatatcaacctctgataaatgaagcagcaaaagcaatgctgaggcaaatgatgaaattggatacttctcgactagaatcttttagtaataacgctgataattacttgattggtgatcattcatcatcatccggtgcaacggacaggggaaactctttgagccggacttctggagtaacacttcaagtggtccctctgactacaatccagtcttctcacattccatctgcaacagggataggggatgacccttcaacaggaaaatctgagattctatctactcctcaagttgtagcctgtgatgaagttacgaaagctcagtactctaatgtaaatgtttcggttggagaatctaatgcacctgctatccctgttactcaaacagatgaaatcatgcgggacctctctacaataccagacatagtggcaggaaatattcttgatattcctcaagaaaattatatggcacctgagacaggcggtgaaggatatatggatcctacttcatttggagtgaatgtgtcattgcccattgattttgatagtatttcacctgaagcagacattgatgatttgttgaacaatcctcacttttgggatgatattttgcgaactccagtgtcagaggagattgatacgaatgatgctgaagtattcaaggagaatgaggtgcagccaatggaaaatggattggacaaatcacaaaatatggaccaacttactgagcagatgggcctactttcttctgatgccaaaagaatttga

SEQ ID NO: 730 - DNA, 975 bp, Glycine max
atggaacgaagtggcggaatggtaactgggtcgcatgaaaggaacgaacttgttagagttagacacggctctgatagtaggtctaaacccttgaagaatttgaatggtcagagttgtcaaatatgtggtgataccattggattaacggctactggtgatgtctttgtcgcttgtcatgagtgtggcttcccactttgtcattcttgttacgagtatgagctgaaacatatgagccagtcttgtccccagtgcaagactgcattcacaagtcaccaagagggtgctgaagtggagggagatgatgatgatgaagacgatgctgatgatctagataatgagatcaactatggccaaggaaacagttccaaggcggggatgctatgggaagaagatgctgacctctcttcatcttctggacatgattctcaaataccaaacccccatctagcaaacgggcaaccgatgtctggtgagtttccatgtgctacttctgatgctcaatctatgcaaactacatctataggtcaatccgaaaaggttcactcactttcatatgctgatccaaagcaaccaggtcctgagagtgatgaagagataagaagagtgccagagattggaggtgaaagtgccggaacttcggcctctcagccagatgccggttcaaatgctggtacagagcgtgttcaggggacaggggagggtcagaagaagagagggagaagcccagctgataaagaaagtaaacggctaaagaggctactgaggaaccgagtttcagctcagcaagcaagggagaggaagaaggcatacttgattgatttggaaacaagagtcaaagacttagagaagaagaactcagagctcaaagaaagactttccactttgcagaatgagaaccaaatgcttagacaaatattgaagaacacaacagcaagcaggagagggagcaataatggtaccaataatgctgagtga

SEQ ID NO: 731 - DNA, 1446 bp, Glycine max
atggaagcacattctgctttctctattgaaaggtcaaatgctaatgacatggggatgtctgaagtatttccttcatcgttgcctgtccttccatcgcctctagaagagacattccccaaattatctgattctcgaccagcttttatggaaaaagaacttaaaacaaaaccttttacacattcaagtcatttaacttccagcggagcagttgggcatatgttttcatcttctcctggatattcaactgatcttcatcactcatccttttcatcttatgaaaaacaacctagaaatactcattttatttcacaaccattgggtaacatggcttcattgccattatcttattcttcaaatagtgaaccaataccttctacaacgtcaaccccttattccaatggaaacagtgtttcctggcatacagattctctgcctagctttcttgatttcacagccaatacctccattgataatagtcaagtagaaaaccgtgcctgcaatatcatggcaactgaagagtattctaagcgaaatgattggcaggagtgggctgaccaattaatcagtgatgttgatcctttgacttctaactggaatgatcttcttgctgacaacattcaagatctggaaccaaaggtcacaaaatcatcttcacaacttccaatagaacaccaatctcaaagccatcaacaactttgtgcttcatctggagaaaatcgtgttggtgttgccccaacttcctcagcaaattctgcacctgccaagccacggatgcgctggacacctgagcttcatgaggcatttgtggaggctgtcaaccaacttggtgggagtgaaagagctacccctaaaggtgtgctgaagctcatgaaagttgaaggattaactatataccatgttaaaagccacctacagaaatacaggacagctagatatagacctgagtcatctgaaggagctgcagagaaaaatctaagtcgaatcgaagagatgtcatctctagatttgaaaactggtattgagatcactgaagctctgaggttgcagatggaggttcagaagcggttgcatgaacagcttgagattcaaagaaatctacagttgcgaatagaagaacaaggaaggtaccttcagatgatgtttgagaagcagtgcaaacctggcattgaaacatttaaggcatcatcatctgtcatcgagagtcaatctggagtgtcttctgatgccatcaaagattctccagccaaaactgaatcagaaaccatcaaggtggaccactgcaagtcaggagctgatctggctaatggcagtaccacagttgaggaaagctcattggaagtggctgagaagcaggatgctcctgaaattcaagcttccgacaatcctgagcaacatgctagtgaagatagtggtaatgcctcaaagcgtccaaggacagaggagtaa

SEQ ID NO: 732 - DNA, 1149 bp, Glycine max
atgtgtggtggtgcgattatctccgacttcataccggcaggtcccgccagcggggcgcggcgcgtgaccgccgacatcctgtggccgagtttgaggaagcgcttctcgaagccgctgctggacgatgatttcgaggctgggttcagagaattcaaggatgattcggaaatcgaggatgttgatgacgaggacgatgaagacgaggaggagttgaagaagaagccctttgggttctctcgctccagcaacaaggctgcttctaagcctctctctcgtggatcagcaactgtggaatcaaaggggcaagctgagaagtgtgccaagagaaagaggaagaaccagtatcgtggaatccgtcagcgtccatggggaaagtgggctgctgagatccgtgacccaagaaagggggttcgtgtttggcttggaactttcagcactgctgaagaagctgcaagagcttatgatgctgaagcaaggaggatccggggcaagaaagccaaggtgaatttcccggatgagccttcaggcgctgctgcttcctcaaaacgcctcaaggtgaatccagaggctcagccaatgaaggaaaatctgaacaccgtgaagccgaaaatgaaccagatgttcaattttggtcacaatctggagggctactacagcccaatagatcaggtggaacagaaaccactggttaaccagtatgttaaccctgccccgttccctggaaacggagttcaagtctcacctgttactccatctgctgatgttactgcttacttcagctctgagcattcgagcaactcgtttgattattctgaccttggatggggtgaacaagtccccaagacccccgagatctcatccttgctttctgctgctcctttggagggtgctgctgatcaggttcagaagaccaacaactcgcaggatgtggtggctgcacaagatgattctgcaaaaaccctttccgaagagcttgcagacattgaatcccagctcaagttctttgagaccccttcttttcttgatgaagcctgggctgatgctacattggcgtctttgctcggcggagacgcaactcatgacgccgccggaaaccctatgaacctttggagcttcgacgacctgccttccatggcaggagtcttctga

SEQ ID NO: 733 - DNA, 306 bp, Glycine max
atggcctccagcactttgagcaaacaaaagccttatgattcgtgttggaccccaaaacagaacaaggtgtttgaaaaggcacttgcaaagtatgacaaggatacccctgaccgctggcacaatgtagccaaagcaattggtggtaaatcagaagatgatgttaagagacactatcagatactcttggaggatctcaggcacattgagtctggccatgttcccattcccaattacaaatcaacaccaactacctttcctctttcaacaacactcgcttctgaagtatctaaagctgaaatggtttga

SEQ ID NO: 734 - DNA, 1530 bp, Glycine max
atggatccaaaaggaagcttatgtgctacaaggtcctcttccttaacctctcctgggaatggactacaaacaaatttgtcgtcagatcctccctctttctatggggtcaggattgaatcacctttcgaagaattcatccaaccctctcctccaacccaatctgtacttccaggtgaatctaacacagatattgatatccctgaccaggaaaattgtccactgagtgactcctcacataccagtaaactccaagattggaatccaagtgcgatgttgaataacctttccttccttgaagtaaagattcatcagcttcgggatctagtgcatgtaattgttagtaaaaagtgccaaccttttggacaacctcatgaactagtgactcaggaacaacagctcatcacagccgatcttacatcaattattgttcaattgatctctactgctggtagtcttctcccctctgttaggcacaccctcacaaacgcaaatcccttggttggccagcttgaccagcttcatgggattaacctcccttttgaatcagaaccaagtagtggtattaggccacaaaataacagtggaaataaactgtttgatcagtccattcagaatgatctaccaaataaattggaaatggagcaaaactacaatatggaagagcatgagccaaaagatgaagaagatgtggatgagggagagaatcttccacccggttcctacgagattttgcaattagaaaaagaagaaatcctcgcccctcacacacatttctgtacaatatgtgggaaaggattcaagagggatgcaaatctccgaatgcacatgcgcggccatggtgacaagtacaaaactcctgcagctcttgcaaaaccacacaaagaatccgggtctgaaccaaagctcatcaagaggtattcctgcccctataacggctgcaagcgtaacaaggatcacaagaaattccaaccactaaagaccattttgtgtgtcaaaaaccactacaagagaacacactgtgacaagagctacacttgcagcagatgcaacaccaagaagttttcagtcatggcagaccttaaaactcatgaaaaacactgcggtaaggataaatggctttgttcatgtggcacaacattttcaaggaaagacaagctttttggacacattgctctattccaaggccatacaccagctattcctttggatgaaaccaaaggaatggctgagccacctgatatccagaacagagaaagcaacaataaggtagaaagtattaacttctgttttggatcaaattcttcaagtgaaaatgtagttcaaaacatgatggatatgaaaggtaataatgatgatcccatgaattatttctcatcattgaacttcgaaggctgtaactttggggcgtttaatgaattctcccaacctccatttgaagattcagatggttgtttctcttttcccatgtcaggatcctttaattatgctcccaaatttggtggcggtgaatcaagttctgacaatctgtag

SEQ ID NO: 735 - DNA, 2724 bp, Glycine max
atgggagatagtggtgtgacatcatctgctgctaccatgatggaagctccaccacctgatggaacaacaacaacagcaacttcaatggattttgattacatgggtgagtttttcttagatgggtgctggttggaagcctctgccgatgtatctgacttcttgctgcaaagtccttccttttccaatcccctctttgacccttcattatcctggcctgccttggagaccaaccacaataaatcccaggatgctgcttttgggactcaacaagaaagtcataacaacatcgttagtgttgttgctggtggtggttatagtcagcagtttcagtctgagactcattcagttgaaggtgtatctgaaggtgtcagaaggtggtggtttgcaccctcacccatacctagtcctggacctgggccttctataatggagaagctaataagggccctcatgtggatcaaagattacaacaggaacaaagatatgcttatacagatttgggtgccaattcataaagagggtaggccgattcttgcggctgatgaccttctgttctcacttgaatccaagtctctgaatcttgcaaagtaccgcgaaatctctgtgacatatgagttctctgcagaggagagtgactccaaggagttggcgcggggattgcctggtcgagtgtttaggtacaaggttcctgagtggactcctgatgttagattctttaggagtgatgagtatccaagagttgaccatgctcaagagtatgatgtgcgtggaacggtggcggttccaatctttgaacaaggaagcaagacgtgcttgggggttattgaggttgtgatgactactcagcagatcaactatggtcctgaacttgagagtgtttgcaaagcacttgaggctgttgatcttagaagctcaaaacaattaagtattcagaatgtgaaggcatgcaataggacctatgaagctgcactacctgagatttatgaggtgttgagatctgcttgtgaaatgcacagattacctttagctcaaacttgggtcccatgtgtacaacaaggcaaagaggggtgccggcactctgaagataattatctactctgcatatctcctgtggagcatgcttgctatgttggtgatccctctattaggtcttttcatgaggcttgcactgagcatcacttgttaaaaggtgaaggtgttgctgggggagcttttatgacaaaccagccgtgcttctcagatgacataacttccttaagcaagaaagactatccactgtctcattatgcaagattgtttggattgcacgctgctgttgccatacgccttcgaagcatctataatagcacagatgactttgttctagagttcttcttgcctgtagattgcaatgacagtgaagagcagagaaagatgcttactgcactgtccatcattatacaaagggtttgtcgcagcctgcgcgttataagagacaaggaattagaggaagctaacttgtcagttgatgaagtgatagcccttgcagatagtggatttgctaggaatgcaattttttcggaaccccaatacaaagggatggtcgcctcattggatgctgaagaaaaatcaagtgaaacaatgggtagaaaattctctgacctaaggcagcaacaagaaagtcctattttaaaaggaaaccttgactgtgttaaggagtgttctacgtctgttgagggtaacttatcaagtttgggaacaaataaaactggagagagaagacgtgccaaagcagagaaaactatcactttgcaagttcttagacaatattttgctggaagcctaaaagatgctgccaagaatattggtgtttgtactacaactttgaaaaggatctgccggcaacatgggataaagcgttggccttctcgaaagatcaaaaaggttggtcactctctacaaaaacttcaacttgtcatcaactcagttcaaggtgcctctggtgcatttcaaatcggttccttctattcaaacttcccggatctagcttctccaaatttatcaggaactggcttcttctcaactttgaatcaaagtgattatccaaactcaacaagcacacagccagatcatggctcattgagcccagaaggtgcatcaaaatcgccatcttcatcgtgcagtcagagttccatttcaagccattcctgctccagcatgtcagagctacaacagcatcgcacagctaacggtgctggtaacaaagtttccaccacggttagtgaagattctgctggtgttgtgttgaagaggatcagtagcgaggcagagcttaaaagccttagtcaagatagagcaaagctcttgccaagatcacaaagccaggaaacacttggtgaacaccctaaaactcagtatcaacagcctttattgaaaaccagtagcagcaaggtggattctcacagagtaaaagtcgcatatggagatgagaaaacccggtttcggatgccgaagagttggggctatgaagatcttctgcaggaaattgcaaggagatttaatgtgagtgacatgagcaaatttgatgtcaaatacttggatgatgactgtgagtgggtactactcacttgtgatgctgatttagaggagtgcattgatgtttgtcaatcttccgagagtggtaccatcaaacttagtctacaaccttctagtcatagtatgagaagttctttagaatttagataa

SEQ ID NO: 736 - DNA, 1161 bp, Glycine max
atgaactacttgtatcctgtgaaagaagagtacttggaatggccaccaccgtcgtcgtcgccgccaacaacgggaggagttgatgagtcagcaatggttcctcctcctcggccaatgggggggcttcacgaaatagggccacccccatttctgaccaagacttacgatgcagtggaggatcccaccactagccacatggtttcatggaacagaggaggtgccagctttgttgtttgggatccacacgctttctccagagaccttcttcctagatacttcaagcacaacaatttctcaagctttgttagacaactaaacacttacggttttagaaaaattgatccagataggtgggagtttgcaaatgaaggattccttagagggcacaggcacctgttggcaaacataaggagaaggaaacaaccttcttctcagccttcttcttcttcttcttcatcctcttattattattattcttcttcttctcaacaagcacaacaaggtcactgtgttgaagttggtcgctttggacttgatgaagagattgatcgtttgaggcgtgacaagcacgtgttgatgatggagcttgtgaagctgagacagcagcaacagaacacaaggtcataccttcaagcaatggaggagaggctaagagggacggaaattaagcagcaacaaatgatggctttcttggctagagctttgaaaaatccaacctttattcagcagctacttcagcagaaggagaagaggaaggagcttgaagaggccatgtccaagaagaggagaaggccaattgagagagggccaaaccatggggttgttggagaagaatcaagcagtgttaaggttgagtctcttgtgtttggtgatgaatatggttttggagtgtcagagttggaagtgttagctatggagatgcaaggttatggtaagggaaggagggaacaagaggaggagcctgatgaggcactagatcaatcacaagagaggctggagaaagagcttgatgaagggttctgggaagaacttttcagtgagggttttgagggtgaattggatactaatccaactaattcccaagaccaagatgaagaagaagaagatcatgtcaatgtgttggccaatcgctttggttacttgggttcaagtcctaaatga

SEQ ID NO: 737 - DNA, 1059 bp, Glycine max
atgttggagggccaagcaacaacgcccacgtggccgcgcatgtgcgacacgtgccgctccgtcccctccaccgtcttctgccgctcccacaccgcctttctctgcgccacgtgcgacactcgcctccacgtctctctcacgtggcacgagcgcgtgtgggtgtgcgaggcgtgcgagcgcgccccggcggcgttcctctgcaaggccgacgccgcctccctctgcgcctcctgcgacgccgacatccacgccgccaaccccctcgccagccgccaccaccgcgtccccatcctccccatcgccgccgccaacaacaacaacaacgacgacgacgacgttgctgacgttgacgacgaagacgaaaccgcttcatggctcttgctcaaccctatcaagagtgctactgtccctaacaccaataacaataacaataataacgggttcttgtataacggtgaggttgatgagtatttggaccttgttgataattgtaactcttgtggtgataataatcacttcgcttcagctgctgctactactgatcattacgctcagcaccaacatttcgctggtgtttctcagaagagttatgctggggacagtgttgttccggttcagcaacaccagcattttcagcttgggttggagtttgacaactccaaacctgccttcagttacaatggttctgttagtcaaagtgtttcagtttcatcaatggatattggtgttgtacctgaatcaccaatgagggatgtctcaattgcccatacaagaccccccaaagggacaattgacctattttctggacctccaattcaggtgccttcccatttttctccaatggacagggaggccagagtcctaaggtacagggagaaaaagaagatgagaaaatttgagaagacaatcaggtatgcctcaaggaaggcctatgcagagactagacctcgtataaaaggtcgatttgccaagagaacagatgtagaagctgaagtggatcagatgttctcgacaacactaattacagaagttggatatggaattgttccctctttctga

SEQ ID NO: 738 - DNA, 630 bp, Glycine max
atggtgagaggaaagactcagatgaggcgcatagagaacgccacaagcaggcaagtcaccttctcaaagcggcgtaatgggttgctgaagaaggcctttgaactttctgttctttgtgatgctgaggttgctctcatcattttctctccaagaggaaagctttatgaatttgcaagctccagcatgcaggacacaattgaacgctaccgcaggcataacaggagtgctcaaacagtgaacagatctgatgaacaaaatatgcagcatttgaagcaagaaacagcaaacttgatgaagaagattgagcttcttgaggcttcaaaacggaagctcttgggagaaggtttggggtcatgctccttagaagaactgcaacagatagaacaacaattggaaaggagtgtaagcaatgttcgtgcaagaaagaatcaagtttacaaggaacaaattgatcaactaaaagagaaggaaagagctctatatgctgaaaatgctaggctgtgtgagcagtatggtatccagccacagccagcaacaaaggatccgaaagaaattcaaccctatgcagaaagcagtccaagttcagaagtggagactgaattgttcattggactacccaggtctatctag

SEQ ID NO: 739 - DNA, 2211 bp, Glycine max
atggggttgatcgatctgaacaccacggaagatgatgaagctgctccattatctgcttcttctccagcttcatattcttcttcttcttctcactcggggataagcacttctgcttcaaccttggttgttcctcctactcctccttctgtgtgcttggaactgtggcacgcgtgtgcgggccctttgatctctctgccgaagaaaggaagtgttgttgtgtacttgccacagggacactttgagcatgttcaggattttccggtcactgcttatgatatcccaccccacgtgttctgtcgtgtccttgatgtcaagctccatgcagaggaagggagcgatgaagtgtattgccaagtgttgttggttcctgaaagtgagcaagtggagcaaagcttgcgggaaggggaaattgttgctgatggggaagaggaggatactgaagctatagtgaagtcaacaactccccatatgttctgcaagactctcacagcttcagacaccagcactcatggtggattctcggtgccccggcgagcagctgaagattgctttcctcccctggattacagtcaacagagaccttcacaagagcttgtggcaaaggatcttcatggcttggaatggaggtttcgacatatatataggggccaaccacggaggcatctgctcacaactgggtggagtgcatttgtgaacaaaaagaagcttgtttctggagatgctgtgttgtttcttaggggcgacgatggagaactgagattagggattcgcagggcagctcagttgaaaagtgctggttcgtttgcagttccctctggtcagcaattgaatcctgcaactctcaagggtgttgttaatgcattatctacaagatgtgcatttagtgtttgctacaatccaaggttcagctcttcagaattcatcatacctgttcacaaattcttaaagagccttgactgttcttattcagttggaatgaggttcaggatgcgttttgaaactgaagacgcggcagagcgaagatgcactggattaattgctggaattagtgatgttgatccagttagatggctcggatcaaaatggagatgcctactggtaaggtgggatgacatagaagctgctaggcgcaatagggtttccccatgggaaattgagccatctggttctgcttcaaattccagtaacttgatgtcagctggtttgaagaggaccaggattggaatgacttcagtgaagctggaatttcccactcccgatgggattggagcatcagactttggggaatcgttaaggttccggaaggtcttgcaaggtcaagaaattttgggtgttaatactccctttgatggtattaatgctcagagtccccggttatacgagttagggaggtgctatcctggttcaaactgttcagggattcctccaacaggaaataatatcagaatgccgcatccagcgtctgatttttcctgcaatggcataggctttagtgaatctttccggttccagaaggtcttgcaaggtcaagaaattcttccaagccaaccatatggaagagtcttatctattgaggaggctcgagcaaatggttgctatggactatatgatggctgtcagttgcttaacaccagaaatggatggtctgcacagatgcatgacaatgctccatatttgcatgcatctgttacacctgcacaagtatcatctccatcatctgtgttaatgttccagcaagcagttaatccagtttcaaactgtgattataataaaaacaaacgtgataaggaaatggagggtagagtccattaccaaggtttatacacatctgaagtgaaaggtagaacatttgcatcttccccattcgatgatcctattttatccacgctagctcccgaaggtgctagttctttgggtatgtttgatgttcataaccagttgggtagttcacggccacatgaatcagtgtcagcattgagaagcagtcaagagttggtttcctcatgtaaaagtagttgcagactctttggtttttcattgactgaggacacacatcttgcaaagaaagaggcgtcagcctctaccatcactttaccattgagttctggaccttcctttactagacttgttgaagatgagttccatcccggccattcccttccgagtaagggagttggaagtaactgcaccaagggtgtattgcagtattga

SEQ ID NO: 740 - DNA, 1023 bp, Glycine max
atggatgtttcgaggaagcagcaaattaaacatcggaaacaaagagagagagagagagagagcatgacagacgaacagcaacatcaattcccatcatcgatggtctcctctcccctatatatacatatataccacgcagaagtggaaaataaaagtgaagaaaacagaccaaaaatagaaagaaagagaaataccaaaaccttggcgcatcatattctttattccctcacttggatcgttaattccgcgaacgagcttctgcccttcaaattaaccatggagaatattggtgaggagtacggctactggccggagaacgacatgcttttccaaaacgaagaccttggcagctgggcgataatggatgaggcagcgttatcagggtcagggtactatgattcaagctccccggacggtactggtgcttcttcatcggtggcatctaagaacattgtctccgagaggaatagaaggaagaagctcaacgataggctttttgctctaagagcagtggtccccaacattaccaagatggataaggcttctatcattaaggatgctattgagtacatccagcacttgcatgaccaagagaagagaatccaagctgagattttggatcttgaatctgggaataaactcaaaaacccaacctatgaatttgaccaggacctccctattctgctcaggtccaagaagaagagaacagaacagctattcggttctgtcagttcaagaaattctccaattgaaataattgacctgagggtaacatacatgggagagaagacgtttgtggtgagcttgacatgtagcaaaaggacagacacaatggtaaaactgtgtgcggtgttcgaatctttaaagctgaaagtcattacggccaatatcacttctttttcaggcacgcttctgaagacagtcttcatccaggcagatgaagaagagagagactttttgcatataaaaattcagacagcgatttcagctctcaatgatcctctaagcccaatgagtatctga

SEQ ID NO: 741 - DNA, 684 bp, Glycine max; identical to SEQ ID NO: 162

SEQ ID NO: 742 - protein, 69 aa, Glycine max
MASSWTPRQNKLFEEALAIYDRETPDRWQNVARVVGKSVEDVKRHYEILKEDIKRIERGQIPLPNYAGS

SEQ ID NO: 743 - protein, 414 aa, Glycine max
MNEIQILIVAITIHKRLDFGMERVLSVDEISEQYWVAASSSSSSSSSSFKSKMNRSESEWAFQQFLQQEAASSSSNSDHDDDHHHAKLKKESNTNIPVTLHVDSQDYHAILKTKLNLACAAVAMTRGSLVKSQNPDSGPQASNFSEVGSHATLKGSGPFGNDDPSKLQNKDIKAQIGIPSSPSMQNKSAVVAMRPTISGSSGEQSDDEEAEGEINMTGNMTPVDAKRVRRMLSNRESARRSRRRKQAHLTELETQVSQLRSENSSLLKRFTDVSQKYSNAAVDNRVLKADVETLRAKVKMAEETVKRITGLSPMLHAMTEMSSLGMPLFDESPSETSADAAVPVQEDPNHHLCQPTSNNGLGGISSIETVQQNVAAVVGGNKMGRTTSLHRVASLEHLQKRIRGGADSRGTPSN

SEQ ID NO: 744 - protein, 367 aa, Glycine max
MVVCDFWELSLAQSQRKTPKSNIIMEPSLDLRLGFVPKPLSLFFGDVSGNRDKCDKVVTLDGFVQRLEEELTKVEAFKRELPLCILLLNDAIARLKEEKVKCSGMQDPPLKTSSGGNENENSEKKNWMSSAQLWSTQKSKSRNEEDDRSVPANSINGNSCVPEKEGSQVPSFGLMARASELSHSNSKSVGGDTSSGSSLLRVEVQSQPQPPQHMQQNPRKQRRCWSPELHRRFVDALQQLGGAQVATPKQIRELMQVEGLTNDEVKSHLQKYRLHVRRFPVFSIGQVDNGSWMTQDECGDKSKGNMSQSGSPQGPLTPLLLGGAGSAKGLSSPGRNSVDAEDEQSSDCRNWKGGLHHQQLETDNHSL

SEQ ID NO: 745 - protein, 374 aa, Glycine max
MGIERGGFKGFRSAWSVPPKPCDSCKLASAALFCRPDSAFLCIACDSNIHCSNKLASRHERVWMCEVCEQAPAAVTCKADAAALCVTCDSDIHSANPLAQRHERVPVEPFFDSAESIVKASAAATFGFIVPSDDGGASDAFAPDDSDAAAWLIPNPNFGSKLMDAPEIKSKEIFFSEMDPFLDFDYSNSFQNNNSAGNDSVVPVQKPSLAPPLINNHHHHQSETCFDVDFCRSKLSSFNYPSNSLSQSVSSSSLDVGVVPDGNTVSDMSYSFGRNSSDSSGIVVVSGNSVGQGATQLCGMDREARVLRYREKRKNRKFEKTIRYASRKAYAETRPRIKGRFAKRTEIDSDVERLYSPGPAVLMLDTPYGVVPSF

SEQ ID NO: 746 - protein, 403 aa, Glycine max
MDRVFSVDDISDHFWQPPIPVSAAQTSSQMSRSASEWAFQRFLQEASASAPSPPSSSSAADVVFVEIEDQPKPAPPPPTNGAVLPNAPGPVPLDSDEYQAFLKSKLNLACAAVAMTRGSLAKSQDPSPFSEGGSQPTNPSLVESQTTSKGSIPSENDPSKLQDKDTNVPVGIPSIPAMQKKPAVAIRPSTSGSSREQSDDEDIEGETSMNDNTDPADVKRVRRMLSNRESARRSRRRKQAHLTDLETQVSQLRGENSTLLKRLTDVSQKYSDSAVDNRVLKADVETLRTKVKMAEETVKRITGLNPLLHAMSDISSLGLPSFDGRSPSDTSADAAVPVQDDPHHHFYQPTSTNPIPSHDPIVNNGLGGISSIENVQQNAAVVLGGNKMGQTASLQRVASLEHL

SEQ ID NO: 747 - protein, 207 aa, Glycine max
MFSINHFSDPDATSPGSGGSSRPALSDEDFFLAASNPKKRAGRKKFRETRHPVYRGVRRRDSGKWVCEVREPNKKSRIWLGTFPTAEMAARAHDVAAIALRGRSACLNFADSASRLPVPATAEARDIQKAAAEAAEAFRPGKDDDAVAERVAATATEREEEQEEGMVPEYLRNMVLMSPTHCFGSDEYGSADVEFDDAEVSLWSYSI

SEQ ID NO: 748 - protein, 238 aa, Glycine max
MEYTYSAGVEAETHTSSSTTPSRSKKRNNNTRRFSDEQIKSLETMFESESRLEPRKKLQLARELGLQPRQVAIWFQNKRARWKSKQLERDYGILQSNYNSLASRFEALKKENQTLLIQLQKLNHLMQKPMEPGQRCTQVEAANSMDSESENGGTMKCEAEGKPSPSMEISEHLLGVLSDDDTSIKVEDFGLEDEHGLLNFAKHVDGSLTSPEDWNAFESNDLLGQSTTDDYQWWDFWS

SEQ ID NO: 749 - protein, 510 aa, Glycine max
MDGRASSSVGGEASPAPAPVPITNANAPPPFLSKTYEMVEDPSTDSIVSWSPTNNSFVVWNPPEFARDLLPKHFKHNNFSSFVRQLNTYGFRKVDPDRWEFANEGFLRGQKHLLKTITRRKPAHGHNQQAQQAHGQSSSVGACVEVGKFGLEEEVEILKRDKNVLMQELVRLRQQQQATDNQLQSMVQRLQGMEQRQQQMMSFLAKAVQSPGFLAQFVQQQNESSRRITEANKKRRLKQEGIGEMEHTAASDGQIVKYQPLINEAAKAMLRQMMKLDTSRLESFSNNADNYLIGDHSSSSGATDRGNSLSRTSGVTLQVVPLTTIQSSHIPSATGIGDDPSTGKSEILSTPQVVACDEVTKAQYSNVNVSVGESNAPAIPVTQTDEIMRDLSTIPDIVAGNILDIPQENYMAPETGGEGYMDPTSFGVNVSLPIDFDSISPEADIDDLLNNPHFWDDILRTPVSEEIDTNDAEVFKENEVQPMENGLDKSQNMDQLTEQMGLLSSDAKRI

SEQ ID NO: 750 - protein, 324 aa, Glycine max
MERSGGMVTGSHERNELVRVRHGSDSRSKPLKNLNGQSCQICGDTIGLTATGDVFVACHECGFPLCHSCYEYELKHMSQSCPQCKTAFTSHQEGAEVEGDDDDEDDADDLDNEINYGQGNSSKAGMLWEEDADLSSSSGHDSQIPNPHLANGQPMSGEFPCATSDAQSMQTTSIGQSEKVHSLSYADPKQPGPESDEEIRRVPEIGGESAGTSASQPDAGSNAGTERVQGTGEGQKKRGRSPADKESKRLKRLLRNRVSAQQARERKKAYLIDLETRVKDLEKKNSELKERLSTLQNENQMLRQILKNTTASRRGSNNGTNNAE

SEQ ID NO: 751 - protein, 481 aa, Glycine max
MEAHSAFSIERSNANDMGMSEVFPSSLPVLPSPLEETFPKLSDSRPAFMEKELKTKPFTHSSHLTSSGAVGHMFSSSPGYSTDLHHSSFSSYEKQPRNTHFISQPLGNMASLPLSYSSNSEPIPSTTSTPYSNGNSVSWHTDSLPSFLDFTANTSIDNSQVENRACNIMATEEYSKRNDWQEWADQLISDVDPLTSNWNDLLADNIQDLEPKVTKSSSQLPIEHQSQSHQQLCASSGENRVGVAPTSSANSAPAKPRMRWTPELHEAFVEAVNQLGGSERATPKGVLKLMKVEGLTIYHVKSHLQKYRTARYRPESSEGAAEKNLSRIEEMSSLDLKTGIEITEALRLQMEVQKRLHEQLEIQRNLQLRIEEQGRYLQMMFEKQCKPGIETFKASSSVIESQSGVSSDAIKDSPAKTESETIKVDHCKSGADLANGSTTVEESSLEVAEKQDAPEIQASDNPEQHASEDSGNASKRPRTEE

SEQ ID NO: 752 - protein, 382 aa, Glycine max
MCGGAIISDFIPAGPASGARRVTADILWPSLRKRFSKPLLDDDFEAGFREFKDDSEIEDVDDEDDEDEEELKKKPFGFSRSSNKAASKPLSRGSATVESKGQAEKCAKRKRKNQYRGIRQRPWGKWAAEIRDPRKGVRVWLGTFSTAEEAARAYDAEARRIRGKKAKVNFPDEPSGAAASSKRLKVNPEAQPMKENLNTVKPKMNQMFNFGHNLEGYYSPIDQVEQKPLVNQYVNPAPFPGNGVQVSPVTPSADVTAYFSSEHSSNSFDYSDLGWGEQVPKTPEISSLLSAAPLEGAADQVQKTNNSQDVVAAQDDSAKTLSEELADIESQLKFFETPSFLDEAWADATLASLLGGDATHDAAGNPMNLWSFDDLPSMAGVF

SEQ ID NO: 753 - protein, 101 aa, Glycine max
MASSTLSKQKPYDSCWTPKQNKVFEKALAKYDKDTPDRWHNVAKAIGGKSEDDVKRHYQILLEDLRHIESGHVPIPNYKSTPTTFPLSTTLASEVSKAEMV

SEQ ID NO: 754 - protein, 509 aa, Glycine max
MDPKGSLCATRSSSLTSPGNGLQTNLSSDPPSFYGVRIESPFEEFIQPSPPTQSVLPGESNTDIDIPDQENCPLSDSSHTSKLQDWNPSAMLNNLSFLEVKIHQLRDLVHVIVSKKCQPFGQPHELVTQEQQLITADLTSIIVQLISTAGSLLPSVRHTLTNANPLVGQLDQLHGINLPFESEPSSGIRPQNNSGNKLFDQSIQNDLPNKLEMEQNYNMEEHEPKDEEDVDEGENLPPGSYEILQLEKEEILAPHTHFCTICGKGFKRDANLRMHMRGHGDKYKTPAALAKPHKESGSEPKLIKRYSCPYNGCKRNKDHKKFQPLKTILCVKNHYKRTHCDKSYTCSRCNTKKFSVMADLKTHEKHCGKDKWLCSCGTTFSRKDKLFGHIALFQGHTPAIPLDETKGMAEPPDIQNRESNNKVESINFCFGSNSSSENVVQNMMDMKGNNDDPMNYFSSLNFEGCNFGAFNEFSQPPFEDSDGCFSFPMSGSFNYAPKFGGGESSSDNL

SEQ ID NO: 755 - protein, 907 aa, Glycine max
MGDSGVTSSAATMMEAPPPDGTTTTATSMDFDYMGEFFLDGCWLEASADVSDFLLQSPSFSNPLFDPSLSWPALETNHNKSQDAAFGTQQESHNNIVSVVAGGGYSQQFQSETHSVEGVSEGVRRWWFAPSPIPSPGPGPSIMEKLIRALMWIKDYNRNKDMLIQIWVPIHKEGRPILAADDLLFSLESKSLNLAKYREISVTYEFSAEESDSKELARGLPGRVFRYKVPEWTPDVRFFRSDEYPRVDHAQEYDVRGTVAVPIFEQGSKTCLGVIEVVMTTQQINYGPELESVCKALEAVDLRSSKQLSIQNVKACNRTYEAALPEIYEVLRSACEMHRLPLAQTWVPCVQQGKEGCRHSEDNYLLCISPVEHACYVGDPSIRSFHEACTEHHLLKGEGVAGGAFMTNQPCFSDDITSLSKKDYPLSHYARLFGLHAAVAIRLRSIYNSTDDFVLEFFLPVDCNDSEEQRKMLTALSIIIQRVCRSLRVIRDKELEEANLSVDEVIALADSGFARNAIFSEPQYKGMVASLDAEEKSSETMGRKFSDLRQQQESPILKGNLDCVKECSTSVEGNLSSLGTNKTGERRRAKAEKTITLQVLRQYFAGSLKDAAKNIGVCTTTLKRICRQHGIKRWPSRKIKKVGHSLQKLQLVINSVQGASGAFQIGSFYSNFPDLASPNLSGTGFFSTLNQSDYPNSTSTQPDHGSLSPEGASKSPSSSCSQSSISSHSCSSMSELQQHRTANGAGNKVSTTVSEDSAGVVLKRISSEAELKSLSQDRAKLLPRSQSQETLGEHPKTQYQQPLLKTSSSKVDSHRVKVAYGDEKTRFRMPKSWGYEDLLQEIARRFNVSDMSKFDVKYLDDDCEWVLLTCDADLEECIDVCQSSESGTIKLSLQPSSHSMRSSLEFR

SEQ ID NO: 756 - protein, 386 aa, Glycine max
MNYLYPVKEEYLEWPPPSSSPPTTGGVDESAMVPPPRPMGGLHEIGPPPFLTKTYDAVEDPTTSHMVSWNRGGASFVVWDPHAFSRDLLPRYFKHNNFSSFVRQLNTYGFRKIDPDRWEFANEGFLRGHRHLLANIRRRKQPSSQPSSSSSSSSYYYYSSSSQQAQQGHCVEVGRFGLDEEIDRLRRDKHVLMMELVKLRQQQQNTRSYLQAMEERLRGTEIKQQQMMAFLARALKNPTFIQQLLQQKEKRKELEEAMSKKRRRPIERGPNHGVVGEESSSVKVESLVFGDEYGFGVSELEVLAMEMQGYGKGRREQEEEPDEALDQSQERLEKELDEGFWEELFSEGFEGELDTNPTNSQDQDEEEEDHVNVLANRFGYLGSSPK

SEQ ID NO: 757 - protein, 352 aa, Glycine max
MLEGQATTPTWPRMCDTCRSVPSTVFCRSHTAFLCATCDTRLHVSLTWHERVWVCEACERAPAAFLCKADAASLCASCDADIHAANPLASRHHRVPILPIAAANNNNNDDDDVADVDDEDETASWLLLNPIKSATVPNTNNNNNNNGFLYNGEVDEYLDLVDNCNSCGDNNHFASAAATTDHYAQHQHFAGVSQKSYAGDSVVPVQQHQHFQLGLEFDNSKPAFSYNGSVSQSVSVSSMDIGVVPESPMRDVSIAHTRPPKGTIDLFSGPPIQVPSHFSPMDREARVLRYREKKKMRKFEKTIRYASRKAYAETRPRIKGRFAKRTDVEAEVDQMFSTTLITEVGYGIVPSF

SEQ ID NO: 758 - protein, 209 aa, Glycine max
MVRGKTQMRRIENATSRQVTFSKRRNGLLKKAFELSVLCDAEVALIIFSPRGKLYEFASSSMQDTIERYRRHNRSAQTVNRSDEQNMQHLKQETANLMKKIELLEASKRKLLGEGLGSCSLEELQQIEQQLERSVSNVRARKNQVYKEQIDQLKEKERALYAENARLCEQYGIQPQPATKDPKEIQPYAESSPSSEVETELFIGLPRSI

SEQ ID NO: 759 - protein, 736 aa, Glycine max
MGLIDLNTTEDDEAAPLSASSPASYSSSSSHSGISTSASTLVVPPTPPSVCLELWHACAGPLISLPKKGSVVVYLPQGHFEHVQDFPVTAYDIPPHVFCRVLDVKLHAEEGSDEVYCQVLLVPESEQVEQSLREGEIVADGEEEDTEAIVKSTTPHMFCKTLTASDTSTHGGFSVPRRAAEDCFPPLDYSQQRPSQELVAKDLHGLEWRFRHIYRGQPRRHLLTTGWSAFVNKKKLVSGDAVLFLRGDDGELRLGIRRAAQLKSAGSFAVPSGQQLNPATLKGVVNALSTRCAFSVCYNPRFSSSEFIIPVHKFLKSLDCSYSVGMRFRMRFETEDAAERRCTGLIAGISDVDPVRWLGSKWRCLLVRWDDIEAARRNRVSPWEIEPSGSASNSSNLMSAGLKRTRIGMTSVKLEFPTPDGIGASDFGESLRFRKVLQGQEILGVNTPFDGINAQSPRLYELGRCYPGSNCSGIPPTGNNIRMPHPASDFSCNGIGFSESFRFQKVLQGQEILPSQPYGRVLSIEEARANGCYGLYDGCQLLNTRNGWSAQMHDNAPYLHASVTPAQVSSPSSVLMFQQAVNPVSNCDYNKNKRDKEMEGRVHYQGLYTSEVKGRTFASSPFDDPILSTLAPEGASSLGMFDVHNQLGSSRPHESVSALRSSQELVSSCKSSCRLFGFSLTEDTHLAKKEASASTITLPLSSGPSFTRLVEDEFHPGHSLPSKGVGSNCTKGVLQY

SEQ ID NO: 760 - protein, 340 aa, Glycine max
MDVSRKQQIKHRKQRERERESMTDEQQHQFPSSMVSSPLYIHIYHAEVENKSEENRPKIERKRNTKTLAHHILYSLTWIVNSANELLPFKLTMENIGEEYGYWPENDMLFQNEDLGSWAIMDEAALSGSGYYDSSSPDGTGASSSVASKNIVSERNRRKKLNDRLFALRAVVPNITKMDKASIIKDAIEYIQHLHDQEKRIQAEILDLESGNKLKNPTYEFDQDLPILLRSKKKRTEQLFGSVSSRNSPIEIIDLRVTYMGEKTFVVSLTCSKRTDTMVKLCAVFESLKLKVITANITSFSGTLLKTVFIQADEEERDFLHIKIQTAISALNDPLSPMSI

SEQ ID NO: 761 - protein, 227 aa, Glycine max; identical to SEQ ID NO: 417

SEQ ID NO: 762 - DNA, 1104 bp, Medicago truncatula
atgtgtggtggtgcaattatctccgacttcatctcaactgcggcggtggtgggtggttcccgccgtgtcaccgccgacatgttgtggcccaatttgaggaaatccagttccagaaaaccgtttttccttgacaatgacttcgaagctgagttcagagagtttaaggatgattctgatttggatgatgatgatgaagggttgttggtcggtgccaaatgttttacctttggttcaactaacaacaaatcttccaactcctttgttcgtggatcaagtgctgcaaaagttgttgcatcgaaatcaaacgagcaaggtgaaaaggaattgaagagaaagaggaagaatcagtataggggtatccgccaacgtccatggggaaaatgggcagctgagatccgtgacccgagaaaaggagttcgtgtttggctcggaactttcaacactgctgaagaagctgcaagagcctacgatgctgaagctaggagaatccgtggcaagaaagccaaggtgaatttccctgaagaggctccaaatgcttcctcaaaacgtctcaagacaaattctgagacacagctgttggacaaaaatctgaactctttcaagtgtgaaaatatagagaactactattccccagtgaatcaggtggaacagagaccattggttaacgcccaatgtgctaatgtcggaccctttgctggaaacggtgttcagcttgcatcttctgatgttactgcatatttcagttcggagtattcgagcaattcatttgattatcctgatctatgttggggtgaacaaggcccgaaaacacctgagatttcatctgtgttttctgctcctatagaaggcgaatctcagaagaatctgcagtctgacaactcgcaggatatgctacctatgcaaaatgattcagcaaagacacactctgaggagcttgcagatatcgaatcccagctgaagttctttgagaactcgtttgatgataactggagtgatgcttcattggcagctttgcttagtgaagatacaactcaggattgtggaaacacagtggacctttggagctttgatgacctgccttccatcgcaggcggagttttctga

SEQ ID NO: 763 - protein, 367 aa, Medicago truncatula
MCGGAIISDFISTAAVVGGSRRVTADMLWPNLRKSSSRKPFFLDNDFEAEFREFKDDSDLDDDDEGLLVGAKCFTFGSTNNKSSNSFVRGSSAAKVVASKSNEQGEKELKRKRKNQYRGIRQRPWGKWAAEIRDPRKGVRVWLGTFNTAEEAARAYDAEARRIRGKKAKVNFPEEAPNASSKRLKTNSETQLLDKNLNSFKCENIENYYSPVNQVEQRPLVNAQCANVGPFAGNGVQLASSDVTAYFSSEYSSNSFDYPDLCWGEQGPKTPEISSVFSAPIEGESQKNLQSDNSQDMLPMQNDSAKTHSEELADIESQLKFFENSFDDNWSDASLAALLSEDTTQDCGNTVDLWSFDDLPSIAGGVF
